(19) United States
(12) Patent Application Publication
(10) Pub. No.: US 2023/0092895 A1
(43) Pub. Date: Mar. 23, 2023

(54) TANDEM CD19 CAR-BASED COMPOSITIONS AND METHODS FOR IMMUNOTHERAPY

(71) Applicant: Obsidian Therapeutics, Inc., Cambridge, MA (US)

(72) Inventors: Vipin Suri, Belmont, MA (US); Michael Joseph Briskin, Lexington, MA (US); Brian Dolinski, Cambridge, MA (US); Kutlu Goksu Elpek, Arlington, MA (US); Tucker Ezell, Cambridge, MA (US); Scott Francis Heller, Stoughton, MA (US); Mara Christine Inniss, Beverly, MA (US); Tariq A. Kassum, Cambridge, MA (US); Nicole Kosmider, Cambridge, MA (US); Abhishek Kulkarni, Brooklin, MA (US); Meghan Langley, Stoughton, MA (US); Dan Jun Li, Cambridge, MA (US); Michelle Lynn Ols, Northborough, MA (US); Benjamin J. Primack, Brookline, MA (US); Celeste Richardson, Brookline, MA (US); Steven Mark Shamah, Acton, MA (US); James Storer, Medford, MA (US); Dexue Sun, Cambridge, MA (US); Vijaya Balakrishnan, Cambridge, MA (US); Andrew R.M. Bradbury, Santa Fe, NM (US); Michael Frank Erasmus, Santa Fe, NM (US); Fortunato Ferrara, Santa Fe, NM (US)

(21) Appl. No.: 17/753,320

(22) PCT Filed: Aug. 30, 2019
(86) PCT No.: PCT/US2019/049099

§ 371 Date: Feb. 28, 2022

(51) Int. Cl. C12N 9/06; C07K 16/28; C07K 14/54; C07K 14/715; C07K 14/725; A61K 35/17

(52) U.S. Cl. CPC C12N 9/003; C07K 16/2803; C07K 14/5434; C07K 14/5443; C07K 14/7155; C12Y 105/01003; C07K 14/7051; A61K 35/17; A61K 2039/505

(57) ABSTRACT

The present invention provides biocircuit systems, effector modules and compositions for cancer immunotherapy. Methods for inducing anti-cancer immune responses in a subject are also provided.

### REFERENCE TO THE SEQUENCE LISTING

[0001] The present application is being filed along with a Sequence Listing in electronic format. The Sequence Listing is provided as a file entitled 268052-454311_ST25.txt, created on Aug. 28, 2019, which is 1.83 Mbytes in size. The information in the electronic format of the sequence listing is incorporated herein by reference in its entirety.

### FIELD OF THE INVENTION

[0002] The present invention relates to compositions and methods for immunotherapy. Provided in the present invention include polypeptides of biocircuit systems, effector modules, stimulus response elements (SREs) and immunotherapeutic agents, polynucleotides encoding the same, vectors and cells containing the polypeptides and/or polynucleotides for use in cancer immunotherapy. In one embodiment, the compositions comprise destabilizing domains (DDs) which tune protein stability.

### BACKGROUND OF THE INVENTION

[0003] Cancer immunotherapy aims to eradicate cancer cells by rejuvenating the tumoricidal functions of tumor-reactive immune cells, predominantly T cells. Strategies of cancer immunotherapy including the recent development of checkpoint blockade, adoptive cell transfer (ACT) and cancer vaccines which can increase the anti-tumor immune effector cells have produced remarkable results in several tumors.

[0004] The impact of host anti-tumor immunity and cancer immunotherapy is impeded by three major hurdles: 1) low number of tumor antigen-specific T cells due to clonal deletion; 2) poor activation of innate immune cells and accumulation of tolerogenic antigen-presenting cells in the tumor microenvironment; and 3) formation of an immunosuppressive tumor microenvironment. Particularly, in solid tumors the therapeutic efficacy of immunotherapeutic regimens remains unsatisfactory due to lack of an effective an anti-tumor response in the immunosuppressive tumor microenvironment. Tumor cells often induce immune tolerance or suppression and such tolerance is acquired because even truly foreign tumor antigens will become tolerated. Such tolerance is also active and dominant because cancer vaccines and adoptive transfer of pre-activated immune effector cells (e.g., T cells), are subject to suppression by inhibitory factors in the tumor microenvironment (TME).

[0005] In addition, administration of engineered T cells could result in on/off target toxicities as well as a cytokine release syndrome (reviewed by Tey Clin. Transl. Immunol., 2014, 3: e17 10.1038).

[0006] Development of a tunable switch that can turn on or off the transgenic immunotherapeutic agent expression is needed in case of adverse events. For example, adoptive cell therapies may have a very long and an indefinite half-life. Since toxicity can be progressive, a safety switch is desired to eliminate the infused cells. Systems and methods that can tune the transgenic protein level and expression window with high flexibility can enhance therapeutic benefit and reduce potential side effects.

[0007] To develop regulatable therapeutic agents for disease therapy, in particular cancer immunotherapy, the present invention provides biocircuit systems to control the expression of immunotherapeutic agents. The biocircuit system comprises a stimulus and at least one effector module that responds to the stimulus. The effector module may include a stimulus response element (SRE) that binds and is responsive to a stimulus and an immunotherapeutic agent operably linked to the SRE. In one example, a SRE is a destabilizing domain (DD) which is destabilized in the absence of its specific ligand and can be stabilized by binding to its specific ligand.

### SUMMARY OF THE INVENTION

[0008] The present invention provides compositions and methods for immunotherapy. In some embodiments, the compositions relate to tunable systems and agents that induce anti-cancer immune responses in a cell or in a subject.

[0009] In some embodiments, the compositions may include but are not limited to (a) an effector module and (b) a chimeric antigen receptor (CAR). The chimeric antigen receptor may be operably linked to the effector module.

[0010] In one embodiment, the effector module may include a stimulus response element (SRE) operably linked to an immunotherapeutic agent. The immunotherapeutic agent may be a cytokine or a cytokine-cytokine receptor fusion protein. In some embodiments, the SRE may be a DD. The DD may be derived from a parent protein or a mutant protein having one, two, three or more amino acid mutations compared to the parent protein. The parent protein may be selected from (i′) human DHFR (hDHFR) (SEQ ID NO. 1); (ii′) E. coli DHFR (ecDHFR) (SEQ ID NO. 2); or (iii′) human protein FKBP (SEQ ID NO. 3; 1087).

[0011] In some aspects, the immunotherapeutic agent may be a cytokine. In one embodiment, the cytokine may be IL12. The IL12 may be a fusion protein that includes but is not limited to a p40 subunit, a linker, and a p35 subunit. In some aspects, the p40 subunit may be a p40 (23-328 of WT) (SEQ ID NO. 563), a p40 (WT) (SEQ ID NO.1091) or a p40 (23-328 of WT) (K217N) (SEQ ID NO. 578). In one embodiment, the p40 subunit may be p40 (23-328 of WT) (SEQ ID NO. 563). In some embodiments, the p35 subunit may be a p35 (57-253 of WT) (SEQ ID NO. 564) or a p35 (WT) (SEQ ID NO. 1093). In one aspect, the p35 subunit may be a p35 (57-253 of WT) (SEQ ID NO. 564).

[0012] The immunotherapeutic agent may also be a cytokine-cytokine receptor fusion protein. In some aspects, the cytokine-cytokine receptor fusion polypeptide may include the whole or a portion of SEQ. ID NO. 785, 803 fused to the whole or a portion of any of SEQ. ID NOs. 803; 1057, 1299 to produce a IL15-IL15 receptor fusion polypeptide.

[0013] In some embodiments, the SRE of the effector module is derived from a hDHFR parent protein. The DD may be a mutant protein having a single mutation selected from the group consisting of hDHFR (I17V), hDHFR (F59S), hDHFR (N65D), hDHFR (K81R), hDHFR (A107V), hDHFR (Y122I), hDHFR (N127Y), hDHFR (M140I), hDHFR (K185E), hDHFR (N186D), and hDHFR (M1400. In some aspects the DD may include a double mutation selected from the group consisting of hDHFR (M1del, I17A), hDHFR (M1del, N127Y), hDHFR (M1del, I17V), hDHFR (M1del, Y122I), hDHFR (M1del, K185E), hDHFR (C7R, Y163C), hDHFR (A10V, H88Y), hDHFR (Q36K, Y122I), hDHFR (M53T, R138I), hDHFR (T57A, I72A), hDHFR (E63G, I176F), hDHFR (G21T, Y122I), hDHFR (L74N, Y122I), hDHFR (V75F, Y122I), hDHFR (L94A, T147A), DHFR (V121A, Y22I), hDHFR (Y122I, A125F), hDHFR (H131R, E144G), hDHFR (T137R, F143L), hDHFR (Y178H, E18IG), hDHFR (Y183H, K185E), hDHFR (E162G, I176F), and hDHFR (M1del, M140I). In some embodiments, the DD may include a triple mutation selected from the group consisting of hDHFR (V9A, S93R, P150L), hDHFR (I8V, K133E, Y163C), hDHFR (L23S, V121A, Y157C), hDHFR (K19E, F89L, E181G), hDHFR (Q36F, N65F, Y122I), hDHFR (G54R, M140V, S168C), hDHFR (V110A, V136M, K177R), hDHFR (Q36F, Y122I, A125F), hDHFR (N49D, F59S, D153G), hDHFR (G21E, I72V, I176T), hDHFR (M1del, I17A, Y122I), hDHFR (M1del, I17V, Y122I), hDHFR (M1del, N127Y, Y122I), hDHFR (M1del, E162G, I176F), hDHFR (M1del, H131R, E144G), and hDHFR (M1del, Y122I, A125F). In some aspects, the DD may include a quadruple or higher mutation selected from the group consisting of hDHFR (M1del, Q36F, Y122I, A125F), hDHFR (M1del, Y122I, H131R, E144G), hDHFR (M1del, E31D, F32M, V116I), hDHFR (M1del, Q36F, N65F, Y122I), hDHFR (V2A, R33G, Q36R, L100P, K185R), hDHFR (M1del, D22S, F32M, R33S, Q36S, N65S), hDHFR (I17N, L98S, K99R, M112T, E151G, E162G, E172G), hDHFR (G16S, I17V, F89L, D96G, K123E, M140V, D146G, K156R), hDHFR (K81R, K99R, L100P, E102G, N108D, K123R, H128R, D142G, F180L, K185E), hDHFR (R138G, D142G, F143S, K156R, K158E, E162G, V166A, K177E, Y178C, K185E, N186S), hDHFR (N14S, P24S, F35L, M53T, K56E, R92G, S93G, N127S, H128Y, F135L, F143S, L159P, L160P, E173A, F180L), hDHFR (F35L, R37G, N65A, L68S, K69E, R71G, L80P, K99G, G117D, L132P, I139V, M140I, D142G, D146G, E173G, D187G), hDHFR (L28P, N30H, M38V, V44A, L68S, N73G, R78G, A97T, K99R, A107T, K109R, D111N, L134P, F135V, T147A, I152V, K158R, E172G, V182A, E184R), hDHFR (V2A, I17V, N30D, E31G, Q36R, F59S, K69E, I72T, H88Y, F89L, N108D, K109E, V110A, 1115V, Y122D, L132P, F135S, M140V, E144G, T147A, Y157C, V170A, K174R, N186S), hDHFR (L100P, E102G, Q103R, P104S, E105G, N108D, V113A, W114R, Y122C, M126I, N127R, H128Y, L132P, F135P, I139T, F148S, F149L, I152V, D153A, D169G, V170A, I176A, K177R, V182A, K185R, N186S), and hDHFR (A10T, Q13R, N14S, N20D, P24S, N30S, M38T, T40A, K47R, N49S, K56R, I61T, K64R, K69R, I72A, R78G, E82G, F89L, D96G, N108D, M112V, W114R, Y122D, K123E, I139V, Q141R, D142G, F148L, E151G, E155G, Y157R, Q171R, Y183C, E184G, K185del, D187N).

[0014] In one embodiment, the DD includes three mutations hDHFR (M1del, Y122I, N127Y). In one embodiment, the DD includes a mutant protein having three mutations hDHFR (M1del, I17V, Y122I). In one aspect, the mutant protein may include two mutations hDHFR (M1del, I17V).

[0015] The CAR described herein may include (a) an extracellular target moiety; (b) a transmembrane domain; (c) an intracellular signaling domain; and (d) optionally, one or more co-stimulatory domains. The extracellular target moiety may be selected from a single chain variable fragment (scFv), Ig NAR, Fab fragment, Fab′ fragment, F(ab)′2 fragment, F(ab)′3 fragment, Fv, bis-scFv, a (scFv)2, minibody, diabody, triabody, tetrabody, intrabody, disulfide stabilized Fv protein (dsFv), unibody, nanobody, and an antigen binding region derived from an antibody that specifically binds to any of a protein of interest, a ligand, a receptor, a receptor fragment or a peptide aptamer. In one embodiment, the extracellular target moiety may be an scFv derived from an antibody that specifically binds a CD19 antigen.

[0016] In some aspects, the scFv may be CD19 scFv is selected from the group consisting of: (a) an amino acid sequence selected from the group consisting of SEQ ID NOs: 465; 83-227; 1034-1036; or (b) a heavy chain variable region having an amino acid sequence independently selected from the group consisting of SEQ ID NO: 9-40, 1169, and a light chain variable region having an amino acid sequence independently selected from the group consisting of SEQ ID NOs: 41-82, 1170.

[0017] In some embodiments, the intracellular signaling domain of the CAR may be a signaling domain derived from T cell receptor CD3zeta or a cell surface molecule selected from the group consisting of FcR gamma, FcR beta, CD3 gamma, CD3 delta, CD3 epsilon, CD5, CD22, CD79a, CD79b, and CD66d. In some aspects, the co-stimulatory domain may be present and is selected from the group consisting of 4-1BB (CD137), 2B4, HVEM, ICOS, LAG3, DAP10, DAP12, CD27, CD28, OX40 (CD134), CD30, CD40, ICOS (CD278), glucocorticoid-induced tumor necrosis factor receptor (GITR), lymphocyte function-associated antigen-1 (LFA-1), CD2, CD7, LIGHT, NKG2C, and B7-H3. In one embodiment, the intracellular signaling domain of the CAR is a T cell receptor CD3zeta signaling domain may include the amino acid sequence of SEQ ID NO: 229. The intracellular signaling domain of the CAR may be a T cell receptor CD3zeta signaling domain comprising the amino acid sequence of SEQ ID NO: 467. In some aspects, the co-stimulatory domain may be present, said co-stimulatory domain may be selected from amino acid sequence of SEQ ID NOs: 233, 228-232, and 234-334.

[0018] In some embodiments, the transmembrane domain may be derived from (a) a molecule selected from the group consisting of CD8α, CD4, CD5, CD8, CD8α, CD9, CD16, CD22, CD33, CD28, CD37, CD45, CD64, CD80, CD86, CD148, DAP 10, EpoRI, GITR, LAG3, ICOS, Her2, OX40 (CD134), 4-1BB (CD137), CD152, CD154, PD-1, or CTLA-4 or (b) a transmembrane region of an alpha, beta or zeta chain of a T-cell receptor; or (c) the CD3 epsilon chain of a T-cell receptor; or a (d) an immunoglobulin selected from IgG1, IgD, IgG4, and an IgG4 Fc region. In one embodiment, the transmembrane domain may include the amino acid sequence selected from the group consisting of SEQ ID NOs. 369, 335-368, 370-385 and 697-707.

[0019] In some aspects, the CAR may further include a hinge region near the transmembrane domain. The hinge region may include an amino acid sequence selected from the group consisting of SEQ ID NOs. 400, 386-399, and 401-464.

[0020] The SRE described herein may be responsive to or interact with at least one stimulus. In one embodiment, the stimulus may be Trimethoprim or Methotrexate.

[0021] In some embodiments, the effector module may be selected from the group consisting of SEQ ID NO. 1121, 1123, 1129, 1131, 1339, 1135, 1137, 1139, and 1141. In some aspects, the CAR may be selected from the group consisting of SEQ ID NO. 1120, 1122, 1128, 1130, 1132, 1134, 1136, 1138, and 1140.

[0022] In one embodiment, the composition may include but is not limited to the amino acid sequence of SEQ ID NO. 1127, 1125, 1126, 1082, 1118, 1119, 1124, or 1127.

[0023] Also provided herein are polynucleotides, vectors and immune cells that include the compositions described herein. The present disclosure also provides a method of inducing an immune response in a subject. Such methods may include preparing an immune cell that includes the compositions of any of claims 1-27; and (b) administering an effective amount of the immune cells to the subject. In one embodiment, the composition may be capable of inducing an immune response. Also provided herein are the methods for inducing the expression of T cell activation markers in the subject. Such methods may include administering an effective amount of the compositions described herein.

### BRIEF DESCRIPTION OF THE DRAWINGS

[0024] The foregoing and other objects, features and advantages will be apparent from the following description of particular embodiments of the invention, as illustrated in the accompanying drawings. The drawings are not necessarily to scale; emphasis instead being placed upon illustrating the principles of various embodiments of the invention.

[0025] FIG. 1 shows the IL12 levels in tandem expression constructs.

[0026] FIG. 2 shows the regulation of IL12 with Shield-1 treatment.

[0027] FIG. 3 shows the effect of EF1a promoter on IL12 levels.

[0028] FIG. 4 shows the effect of different promoters on IL12 levels.

### DETAILED DESCRIPTION OF THE INVENTION

[0029] The details of one or more embodiments of the invention are set forth in the accompanying description below. Although any materials and methods similar or equivalent to those described herein can be used in the practice or testing of the present invention, the preferred materials and methods are now described. Other features, objects and advantages of the invention will be apparent from the description. In the description, the singular forms also include the plural unless the context clearly dictates otherwise. Unless defined otherwise, all technical and scientific terms used herein have the same meaning as commonly understood by one of ordinary skill in the art to which this invention belongs. In the case of conflict, the present description will control.

### I. Introduction

[0030] Cancer immunotherapy aims at the induction or restoration of the reactivity of the immune system towards cancer. Significant advances in immunotherapy research have led to the development of various strategies which may broadly be classified into active immunotherapy and passive immunotherapy. In general, these strategies may be utilized to directly kill cancer cells or to counter the immunosuppressive tumor microenvironment. Active immunotherapy aims at induction of an endogenous, long-lasting tumor-antigen specific immune response. The response can further be enhanced by non-specific stimulation of immune response modifiers such as cytokines. In contrast, passive immunotherapy includes approaches where immune effector molecules such as tumor-antigen specific cytotoxic T cells or antibodies are administered to the host. This approach is short lived and requires multiple applications.

[0031] Despite significant advances, the efficacy of current immunotherapy strategies is limited by associated toxicities. These are often related to the narrow therapeutic window associated with immunotherapy, which in part, emerges from the need to push therapy dose to the edge of potentially fatal toxicity to get a clinically meaningful treatment effect. Further, dose expands in vivo since adoptively transferred immune cells continue to proliferate within the patient, often unpredictably.

[0032] A major risk involved in immunotherapy is the on-target but off tumor side effects resulting from T-cell activation in response to normal tissue expression of the tumor associated antigen (TAA). Clinical trials utilizing T cells expressing T-cell receptor against specific TAA reported skin rash, colitis and hearing loss in response to immunotherapy.

[0033] Immunotherapy may also produce on target, on-tumor toxicities that emerge when tumor cells are killed in response to the immunotherapy. The adverse effects include tumor lysis syndrome, cytokine release syndrome and the related macrophage activation syndrome. Importantly, these adverse effects may occur during the destruction of tumors, and thus even a successful on-tumor immunotherapy might result in toxicity. Approaches to regulatable control immunotherapy are thus highly desirable since they have the potential to reduce toxicity and maximize efficacy.

[0034] The present invention provides systems, compositions, immunotherapeutic agents and methods for cancer immunotherapy. These compositions provide tunable regulation of gene expression and function in immunotherapy. The present invention also provides biocircuit systems, effector modules, stimulus response elements (SREs) and payloads, as well as polynucleotides encoding any of the foregoing. In one aspect, the systems, compositions, immunotherapeutic agents and other components of the invention can be controlled by a separately added stimulus, which provides a significant flexibility to regulate cancer immunotherapy. Further, the systems, compositions and the methods of the present invention may also be combined with therapeutic agents such as chemotherapeutic agents, small molecules, gene therapy, and antibodies.

[0035] The tunable nature of the systems and compositions of the invention has the potential to improve the potency and duration of the efficacy of immunotherapies. Reversibly silencing the biological activity of adoptively transferred cells using compositions of the present invention allows maximizing the potential of cell therapy without irretrievably killing and terminating the therapy.

[0036] The present invention provides methods for fine tuning of immunotherapy after administration to patients. This in turn improves the safety and efficacy of immunotherapy and increases the subject population that may benefit from immunotherapy.

### II. Compositions of the Invention

[0037] According to the present invention, biocircuit systems are provided which comprise, at their core, at least one effector module. Such effector module comprise at least one effector module having associated, or integral therewith, one or more stimulus response elements (SREs). In general, a stimulus response element (SRE) may be operably linked to a payload which could be any protein of interest (POI) (e.g., an immunotherapeutic agent), to form an effector module. The SRE, when activated by a particular stimulus, e.g., a small molecule, can produce a signal or outcome, to regulate transcription and/or protein levels of the linked payload either up or down by perpetuating a stabilizing signal or destabilizing signal, or any other types of regulation. In accordance with the present invention, biocircuit systems, effector modules, SREs and components that tune expression levels and activities of any agents used for immunotherapy are provided.

[0038] As used herein, a “biocircuit” or “biocircuit system” is defined as a circuit within or useful in biologic systems comprising a stimulus and at least one effector module responsive to a stimulus, where the response to the stimulus produces at least one signal or outcome within, between, as an indicator of, or on a biologic system. Biologic systems are generally understood to be any cell, tissue, organ, organ system or organism, whether animal, plant, fungi, bacterial, or viral. It is also understood that biocircuits may be artificial circuits which employ the stimuli or effector modules taught by the present invention and effect signals or outcomes in acellular environments such as with diagnostic, reporter systems, devices, assays or kits. The artificial circuits may be associated with one or more electronic, magnetic, or radioactive components or parts.

[0039] In accordance with the present invention, a biocircuit system may be a destabilizing domain (DD) biocircuit system, a dimerization biocircuit system, a receptor biocircuit system, and a cell biocircuit system. Any of these systems may act as a signal to any other of these biocircuit systems.

### Effector Modules and SREs for Immunotherapy

[0040] In accordance with the present invention, biocircuit systems, effector modules, SREs, and components that tune expression levels and activities of any agents used for immunotherapy are provided. As non-limiting examples, an immunotherapeutic agent may be an antibody and fragments and variants thereof, a cancer specific T cell receptor (TCR) and variants thereof, an anti-tumor specific chimeric antigen receptor (CAR), a chimeric switch receptor, an inhibitor of a co-inhibitory receptor or ligand, an agonist of a co-stimulatory receptor and ligand, a cytokine, chemokine, a cytokine receptor, a chemokine receptor, a soluble growth factor, a metabolic factor, a suicide gene, a homing receptor, or any agent that induces an immune response in a cell and a subject.

[0041] As stated, the biocircuits of the invention include at least one effector module as a component of an effector module system. As used herein, an “effector module” is a single or multi-component construct or complex comprising at least (a) one or more stimulus response elements and (b) at least one payload (e.g. proteins of interest (POIs)). As used herein a “stimulus response element (SRE)” is a component of an effector module which is joined, attached, linked to or associated with one or more payloads of the effector module and in some instances, is responsible for the responsive nature of the effector module to one or more stimuli. As used herein, the “responsive” nature of an SRE to a stimulus may be characterized by a covalent or non-covalent interaction, a direct or indirect association or a structural or chemical reaction to the stimulus. Further, the response of any SRE to a stimulus may be a matter of degree or kind. The response may be a partial response. The response may be a reversible response. The response may ultimately lead to a regulated signal or output. Such output signal may be of a relative nature to the stimulus, e.g., producing a modulatory effect of between 1% and 100% or a factored increase or decrease such as 2-fold, 3-fold, 4-fold, 5-fold, 10-fold or more.

[0042] In some embodiments, the present invention provides methods for modulating protein expression, function or level. In some aspects, the modulation of protein expression, function or level refers to modulation of expression, function or level by at least about 20%, such as by at least about 30%, 40%, 50%, 60%, 70%, 80%, 85%, 90%, 95% and 100%, or at least 20-30%, 20-40%, 20-50%, 20-60%, 20-70%, 20-80%, 20-90%, 20-95%, 20-100%, 30-40%, 30-50%, 30-60%, 30-70%, 30-80%, 30-90%, 30-95%, 30-100%, 40-50%, 40-60%, 40-70%, 40-80%, 40-90%, 40-95%, 40-100%, 50-60%, 50-70%, 50-80%, 50-90%, 50-95%, 50-100%, 60-70%, 60-80%, 60-90%, 60-95%, 60-100%, 70-80%, 70-90%, 70-95%, 70-100%, 80-90%, 80-95%, 80-100%, 90-95%, 90-100% or 95-100%.

[0043] In some embodiments, the present invention provides methods for modulating protein, expression, function or level by measuring the stabilization ratio and destabilization ratio. As used herein, the stabilization ratio may be defined as the ratio of expression, function or level of a protein of interest in response to the stimulus to the expression, function or level of the protein of interest in the absence of the stimulus specific to the SRE. In some aspects, the stabilization ratio is at least 1, such as by at least 1-10, 1-20, 1-30, 1-40, 1-50, 1-60, 1-70, 1-80, 1-90, 1-100, 20-30, 20-40, 20-50, 20-60, 20-70, 20-80, 20-90, 20-95, 20-100, 30-40, 30-50, 30-60, 30-70, 30-80, 30-90, 30-95, 30-100, 40-50, 40-60, 40-70, 40-80, 40-90, 40-95, 40-100, 50-60, 50-70, 50-80, 50-90, 50-95, 50-100, 60-70, 60-80, 60-90, 60-95, 60-100, 70-80, 70-90, 70-95, 70-100, 80-90, 80-95, 80-100, 90-95, 90-100 or 95-100. As used herein, the destabilization ratio may be defined as the ratio of expression, function or level of a protein of interest in the absence of the stimulus specific to the effector module to the expression, function or level of the protein of interest, that is expressed constitutively and in the absence of the stimulus specific to the SRE. As used herein “constitutively” refers to the expression, function or level of a protein of interest that is not linked to an SRE and is therefore expressed both in the presence and absence of the stimulus. In some aspects, the destabilization ratio is at least 0, such as by at least 0.1, 0.2, 0.3, 0.4, 0.5, 0.6, 0.7, 0.8, 0.9, or at least, 0-0.1, 0-0.2, 0-0.3, 0-0.4, 0-0.5, 0-0.6, 0-0.7, 0-0.8, 0-0.9, 0.1-0.2, 0.1-0.3, 0.1-0.4, 0.1-0.5, 0.1-0.6, 0.1-0.7, 0.1-0.8, 0.1-0.9, 0.2-0.3, 0.2-0.4, 0.2-0.5, 0.2-0.6, 0.2-0.7, 0.2-0.8, 0.2-0.9, 0.3-0.4, 0.3-0.5, 0.3-0.6, 0.3-0.7, 0.3-0.8, 0.3-0.9, 0.4-0.5, 0.4-0.6, 0.4-0.7, 0.4-0.8, 0.4-0.9, 0.5-0.6, 0.5-0.7, 0.5-0.8, 0.5-0.9, 0.6-0.7, 0.6-0.8, 0.6-0.9, 0.7-0.8, 0.7-0.9 or 0.8-0.9.

[0044] In some embodiments, the first SRE of the effector module may stabilize the immunotherapeutic agent by a stabilization ratio of 1 or more, wherein the stabilization ratio may comprise the ratio of expression, function or level of the immunotherapeutic agent in the presence of the stimulus to the expression, function or level of the immunotherapeutic agent in the absence of the stimulus.

[0045] In some embodiments, the SRE may destabilize the immunotherapeutic agent by a destabilization ratio between 0, and 0.09, wherein the destabilization ratio may comprise the ratio of expression, function or level of the immunotherapeutic agent in the absence of the stimulus specific to the SRE to the expression, function or level of the immunotherapeutic agent that is expressed constitutively, and in the absence of the stimulus specific to the SRE.

[0046] The present invention also provides polynucleotides comprising the compositions of the invention.

[0047] The SRE of the effector module may be selected from, but is not limited to, a peptide, peptide complex, peptide-protein complex, protein, fusion protein, protein complex, protein-protein complex. The SRE may comprise one or more regions derived from any natural or mutated protein, or antibody. In this aspect, the SRE is an element, when responding to a stimulus, can tune intracellular localization, intramolecular activation, and/or degradation of payloads.

[0048] In some embodiments, effector modules of the present invention may comprise additional features that facilitate the expression and regulation of the effector module, such as one or more signal sequences (SSs), one or more cleavage and/or processing sites, one or more targeting and/or penetrating peptides, one or more tags, and/or one or more linkers. Additionally, effector modules of the present invention may further comprise other regulatory moieties such as inducible promoters, enhancer sequences, microRNA sites, and/or microRNA targeting sites. Each aspect or tuned modality may bring to the effector module or biocircuit a differentially tuned feature. For example, an SRE may represent a destabilizing domain, while mutations in the protein payload may alter its cleavage sites or dimerization properties or half-life and the inclusion of one or more microRNA or microRNA binding site may impart cellular detargeting or trafficking features. Consequently, the present invention embraces biocircuits which are multifactorial in their tenability. Such biocircuits may be engineered to contain one, two, three, four or more tuned features.

[0049] In some embodiments, effector modules of the present invention may include one or more degrons to tune expression. As used herein, a “degron” refers to a minimal sequence within a protein that is sufficient for the recognition and the degradation by the proteolytic system. An important property of degrons is that they are transferrable, that is, appending a degron to a sequence confers degradation upon the sequence. In some embodiments, the degron may be appended to the destabilizing domains, the payload or both. Incorporation of the degron within the effector module of the invention, confers additional protein instability to the effector module and may be used to minimize basal expression. In some embodiments, the degron may be an N degron, a phospho degron, a heat inducible degron, a photosensitive degron, an oxygen dependent degron. As a non-limiting example, the degron may be an Ornithine decarboxylase degron as described by Takeuchi et al. (Takeuchi J et al. (2008). Biochem J. 2008 Mar. 1; 410(2):401-7; the contents of which are incorporated by reference in their entirety).

[0050] In some aspects, the two or more immunotherapeutic agents may be the same type such as two antibodies, or different types such as a CAR construct and a cytokine IL12. Biocircuits and components utilizing such effector molecules are given in FIGS. 7-12 in International Publication No. WO2017/180587, the contents of which are herein incorporated by reference in their entirety.

[0051] In some embodiments, the composition for inducing an immune response may comprise an effector module. In some embodiments, the effector module may comprise a stimulus response element (SRE) operably linked to at least one payload. In one aspect, the payload may be an immunotherapeutic agent.

[0052] In some embodiments, the effector modules of the present invention may include molecular switches. As used herein, the term “molecular switches” refers to any molecule that may be reversibly shifted between two or more stable states in response to a stimulus (e.g., a ligand).

[0053] In some embodiments, molecular switches may be RNA-based switches. As a non-limiting example, the effector module may be provided in an RNA molecule that comprises a coding sequence for a destabilization domain (e.g., FKBP12, ecDHFR) fused to a translational repressor L7Ae, a kink-turn (K-turn) motif in the 5′UTR of a payload mRNA, and the coding sequence for the payload (e.g., peptide or protein). L7Ae is an archaeal protein that binds K-turn and K-loop motifs with high affinity. In the absence of a ligand that stabilizes the destabilization domain, fusion L7Ae protein is degraded and the payload peptide or protein is expressed (ON state), whereas in the presence of the ligand, the fusion L7Ae protein binds to the K-turn motif and represses expression of the payload peptide or protein (OFF state). Other translational regulation systems may also be used, such as, but not limited to, MS2-tethered repressors, Tet repressors, and microRNAs.

[0054] In some embodiments, molecular switches may be switched on/off via dimerization. For example, a first effector module may comprise an SRE which is a first member of a dimerization pair and optionally a first payload, and a second effector module may comprise an SRE which is second member of a dimerization pair and optionally a second payload, wherein the two members of the dimerization pair dimerizes upon addition of a dimerization ligand. In some embodiments, dimerization may restore stability of the members of the dimerization pair and/or the attached payloads. Dimerization induces interaction, whether direct or indirect, of the two payloads to create a desired effect. In some embodiments, dimerization may induce degradation of the dimerization pair and/or the attached payloads. For example, bivalent small-molecule can dimerize two molecules of an E3 ubiquitin ligase to induce self-degradation (Maniaci et al., Nat Commun. 2017 Oct. 10; 8(1):830). Dimerization pair may comprise, or be derived from, for example, an antibody and its antigen, two fragments of an antibody, a ligand-binding domain and a cognate receptor (e.g., any of those described in International Patent Publication NO: WO2017120546, the contents of each of which are incorporated herein by reference in their entirety), and an E3 ubiquitin ligase and a substrate (e.g., as described in Maniaci et al.).

[0055] In some embodiments, molecular switches may be conditionally active in specific cell types or under specific cellular conditions. For example, the stimulus required to stimulate the SREs of the effector modules may only be present in a particular cell type or under a particular cellular condition. This allows various applications, such as cell-type specific delivery of a payload, or detection of a particular cellular target. Based on this property, biocircuits or effector modules of the present invention may be developed as biosensors. For example, the SRE may be fused to a reporter protein (e.g., GFP). The SRE contains mutations such that the SRE is conditionally stable only in the presence of a stabilizing ligand which is also the target to be detected. When the target is present in the cell, the fusion protein is stabilized and the reporter activity can be detected.

[0056] In some embodiments, the immunotherapeutic agent may be selected from, but is not limited to a chimeric antigen receptor (CAR) and an antibody.

[0057] In some embodiments, biocircuits of the invention may be modified to reduce their immunogenicity. Immunogenicity is the result of a complex series of responses to a substance that is perceived as foreign and may include the production of neutralizing and non-neutralizing antibodies, formation of immune complexes, complement activation, mast cell activation, inflammation, hypersensitivity responses, and anaphylaxis. Several factors can contribute to protein immunogenicity, including, but not limited to protein sequence, route and frequency of administration and patient population. In a preferred embodiment, protein engineering may be used to reduce the immunogenicity of the compositions of the invention. In some embodiments, modifications to reduce immunogenicity may include modifications that reduce binding of the processed peptides derived from the parent sequence to MHC proteins. For example, amino acid modifications may be engineered such that there are no or a minimal of number of immune epitopes that are predicted to bind with high affinity, to any prevalent MHC alleles. Several methods of identifying MHC binding epitopes of known protein sequences are known in the art and may be used to score epitopes in the compositions of the present invention.

[0058] Epitope identification and subsequent sequence modification may be applied to reduce immunogenicity. The identification of immunogenic epitopes may be achieved either physically or computationally. Physical methods of epitope identification may include, for example, mass spectrometry and tissue culture/cellular techniques. Computational approaches that utilize information obtained on antigen processing, loading and display, structural and/or proteomic data toward identifying non-self-peptides that may result from antigen processing, and that are likely to have good binding characteristics in the groove of the MHC may also be utilized. One or more mutations may be introduced into the biocircuits of the invention directing the expression of the protein, to maintain its functionality while simultaneously rendering the identified epitope less or non-immunogenic.

[0059] In some embodiments, protein modifications engineered into the structure of the compositions of the invention to interfere with antigen processing and peptide loading such as glycosylation and PEGylation, may also be useful in the present invention. Compositions of the invention may also be engineered to include non-classical amino acid sidechains to design less immunogenic compositions.

[0060] In one embodiment, patients may also be stratified according to the immunogenic peptides presented by their immune cells and may be utilized as a parameter to determine suitable patient cohorts that may therapeutically benefit for the compositions of the invention.

[0061] In some embodiments, reduced immunogenicity may be achieved by limiting immunoproteasome processing. The proteasome is an important cellular protease that is found in two forms: the constitutive proteasome, which is expressed in all cell types and which contains active e.g. catalytic subunits and the immunoproteasome that is expressed in cell of the hematopoietic lineage, and which contains different active subunits termed low molecular weight proteins (LMP) namely LMP-2, LMP-7 and LMP-10. Immunoproteasomes exhibit altered peptidase activities and cleavage site preferences that result in more efficient liberation of many MHC class I epitopes. A well described function of the immunoproteasome is to generate peptides with hydrophobic C terminus that can be processed to fit in the groove of MHC class I molecules. Deol P et al. have shown that immunoproteasomes may lead to a frequent cleavage of specific peptide bonds and thereby to a faster appearance of a certain peptide on the surface of the antigen presenting cells; and enhanced peptide quantities (Deol P et al. (2007) J Immunol 178 (12) 7557-7562; the contents of which are incorporated herein reference in its entirety). This study indicates that reduced immunoproteasome processing may be accompanied by reduced immunogenicity. In some embodiments, immunogenicity of the compositions of the invention may be reduced by modifying the sequence encoding the compositions of the invention to prevent immunoproteasome processing. Biocircuits of the present invention may also be combined with immunoproteasome-selective inhibitors to achieve the same effects. Examples of inhibitors useful in the present invention include UK-101 (B1i selective compound), IPSI-001, ONX 0914 (PR-957), and PR-924 (IPSI).

### 1. Destabilizing Domains (DDs)

[0062] In some embodiments, biocircuit systems, effector modules, and compositions of the present invention relate to post-translational regulation of protein (payload) function anti-tumor immune responses of immunotherapeutic agents. In one embodiment, the SRE is a stabilizing/destabilizing domain (DD). The presence, absence or an amount of a small molecule ligand that binds to or interacts with the DD, can, upon such binding or interaction modulate the stability of the payload(s) and consequently the function of the payload. Depending on the degree of binding and/or interaction the altered function of the payload may vary, hence providing a “tuning” of the payload function. In one embodiment, the destabilizing domain may be referred to as the degradation domain.

[0063] In some embodiments, destabilizing domains described herein or known in the art may be used as SREs in the biocircuit systems of the present invention in association with any of the immunotherapeutic agents (payloads) taught herein. Destabilizing domains (DDs) are small protein domains that can be appended to a target protein of interest. DDs render the attached protein of interest unstable in the absence of a DD-binding ligand such that the protein is rapidly degraded by the ubiquitin-proteasome system of the cell (Stankunas, K., et al., Mol. Cell, 2003, 12: 1615-1624; Banaszynski, et al., Cell; 2006, 126(5): 995-1004; reviewed in Banaszynski, L. A., and Wandless, T. J. Chem. Biol.; 2006, 13:11-21 and Rakhit R et al., Chem Biol. 2014; 21(9):1238-1252). However, when a specific small molecule ligand binds its intended DD as a ligand binding partner, the instability is reversed, and protein function is restored. The conditional nature of DD stability allows a rapid and non-perturbing switch from stable protein to unstable substrate for degradation. Moreover, its dependency on the concentration of its ligand further provides tunable control of degradation rates.

[0064] In some embodiments, the desired characteristics of the DDs may include, but are not limited to, low protein levels in the absence of a ligand of the DD (i.e. low basal stability), large dynamic range, robust and predictable dose-response behavior, and rapid kinetics of degradation. DDs that bind to a desired ligand, but not endogenous molecules may be preferred.

[0065] Several protein domains with destabilizing properties and their paired small molecules have been identified and used to control protein expression, including FKBP/shield-1 system (Egeler et al., J Biol. Chem. 2011, 286(36): 32328-31336; the contents of which are incorporated herein by reference in their entirety), and ecDHFR and its ligand trimethoprim (TMP).

[0066] In some embodiments, the DDs of the present invention may be derived from some known sequences that have been approved to be capable of post-translational regulation of proteins.

[0067] In some embodiments, the DDs of the present invention may be developed from known proteins. Regions or portions or domains of wild type proteins may be utilized as SREs/DDs in whole or in part. They may be combined or rearranged to create new peptides, proteins, regions or domains of which any may be used as SREs/DDs or the starting point for the design of further SREs and/or DDs.

[0068] Ligands such as small molecules that are well known to bind candidate proteins can be tested for their regulation in protein responses. The small molecules may be clinically approved to be safe and have appropriate pharmaceutical kinetics and distribution. In some embodiments, the stimulus is a ligand of a destabilizing domain (DD), for example, a small molecule that binds a destabilizing domain and stabilizes the POI fused to the destabilizing domain.

[0069] In some embodiments, the SRE may comprise a destabilizing domain (DD). The DD may be derived from a parent protein or from a mutant protein having one, two, there, or more amino acid mutations compared to the parent protein. In some embodiments, the parent protein may be selected from, but is not limited to, human protein FKBP comprising the amino acid sequence of SEQ ID NO. 3 or 1087; human DHFR (hDHFR) comprising the amino acid sequence of SEQ ID NO. 2; or E. Coli DHFR (ecDHFR) comprising the amino acid sequence of SEQ ID NO. 1.

[0070] Some examples of the proteins that may be used to develop DDs and their ligands are listed in Table 1.

TABLE 1
Proteins and their binding ligands

| | | Protein | |
|---|---|---|---|
| | Protein | SEQ ID | |
| Protein | Sequence | NO. | Ligands |
| E. coli | MISLIAALAV | 1 | Methotrexate |
| Dihydrofolate | DRVIGMENAM | | (MTX) |
| reductase | PWNLPADLAW | | Trimethoprim |
| (ecDHFR) | FKRNTLNKPV | | (TMP) |
| (Uniprot | IMGRHTWESI | | |
| ID: | GRPLPGRKNI | | |
| P0ABQ4) | ILSSQPGTDD | | |
| | RVTWVKSVDE | | |
| | AIAACGDVPE | | |
| | IMVIGGGRVY | | |
| | EQFLPKAQKL | | |
| | YLTHIDAEVE | | |
| | GDTHFPDYEP | | |
| | DDWESVFSEF | | |
| | HDADAQNSHS | | |
| | YCFEILERR | | |
| Human | MVGSLNCIVA | 2 | Methotrexate |
| Dihydrofolate | VSQNMGIGKN | | (MTX) |
| reductase | GDLPWPPLRN | | Trimethoprim |
| (hDHFR) | EFRYFQRMTT | | (TMP) |
| (Uniprot | TSSVEGKQNL | | |
| ID: | VIMGKKTWFS | | |
| P00374) | IPEKNRPLKG | | |
| | RINLVLSREL | | |
| | KEPPQGAHFL | | |
| | SRSLDDALKL | | |
| | TEQPELANKV | | |
| | DMVWIVGGSS | | |
| | VYKEAMNHPG | | |
| | HLKLFVTRIM | | |
| | QDFESDTFFP | | |
| | EIDLEKYKLL | | |
| | PEYPGVLSDV | | |
| | QEEKGIKYKF | | |
| | EVYEKND | | |
| FK506 | MGVQVETISP | 1087 | Shield-1 |
| binding | GDGRTFPKRG | | |
| protein | QTCVVHYTGM | | |
| (FKBP) | LEDGKKFDSS | | |
| (Uniprot | RDRNKPFKFM | | |
| ID: | LGKQEVIRGW | | |
| P62942) | EEGVAQMSVG | | |
| | QRAKLTISPD | | |
| | YAYGATGHPG | | |
| | IIPPHATLVF | | |
| | DVELLKLE | | |
| FK506 | GVQVETISPG | 3 | Shield-1 |
| binding | DGRTFPKRGQ | | |
| protein | TCVVHYTGML | | |
| (FKBP) | EDGKKFDSSR | | |
| (Uniprot | DRNKPFKFML | | |
| ID: | GKQEVIRGWE | | |
| P62942; | EGVAQMSVGQ | | |
| M1del) | RAKLTISPDY | | |
| | AYGATGHPGI | | |
| | IPPHATLVFD | | |
| | VELLKLE | | |

[0071] In some embodiments, DDs of the invention may be derived from human dihydrofolate reductase (hDHFR). hDHFR is a small (18 kDa) enzyme that catalyzes the reduction of dihydrofolate and plays a vital role in variety of anabolic pathway. Dihydrofolate reductase (DHFR) is an essential enzyme that converts 7,8-dihydrofolate (DHF) to 5,6,7,8, tetrahydrofolate (THF) in the presence of nicotinamide adenine dihydrogen phosphate (NADPH). Anti-folate drugs such as methotrexate (MTX), a structural analogue of folic acid, which bind to DHFR more strongly than the natural substrate DHF, interferes with folate metabolism, mainly by inhibition of dihydrofolate reductase, resulting in the suppression of purine and pyrimidine precursor synthesis. Other inhibitors of hDHFR such as folate, TQD, Trimethoprim (TMP), epigallocatechin gallate (EGCG) and ECG (epicatechin gallate) can also bind to hDHFR mutants and regulates its stability. In one aspect of the invention, the DDs of the invention may be hDHFR mutants including the single mutation hDHFR (Y122I), hDHFR (K81R), hDHFR (F59S), hDHFR (I17V), hDHFR (N65D), hDHFR (A107V), hDHFR (N127Y), hDHFR (K185E), hDHFR (N186D), and hDHFR (M140I); double mutations: hDHFR (M53T, R138I), hDHFR (V75F, Y122I), hDHFR (Y122I, A125F), hDHFR (L74N, Y122I), hDHFR (L94A, T147A), hDHFR (G21T, Y122I), hDHFR (V121A, Y122I), hDHFR (Q36K, Y122I), hDHFR (C7R, Y163C), hDHFR (Y178H, E18IG), hDHFR (A10V, H88Y), hDHFR (T137R, F143L), hDHFR (E63G, I176F), hDHFR (T57A, I72A), hDHFR (H131R, E144G), and hDHFR (Y183H, K185E); and triple mutations: hDHFR (Q36F, N65F, Y122I), hDHFR (G21E, I72V, I176T), hDHFR (I8V, K133E, Y163C), hDHFR (V9A, S93R, P150L), hDHFR (K19E, F89L, E181G), hDHFR (G54R, M140V, S168C), hDHFR (L23S, V121A, Y157C), hDHFR (V110A, V136M, K177R), and hDHFR (N49D, F59S, D153G).

[0072] In one aspect, the parent protein is hDHFR and the DD comprises a mutant protein. The mutant protein may comprise a single mutation and may be selected from, but not limited to hDHFR (I17V), hDHFR (F59S), hDHFR (N65D), hDHFR (K81R), hDHFR (A107V), hDHFR (Y122I), hDHFR (N127Y), hDHFR (M1400, hDHFR (K185E), hDHFR (N186D), and hDHFR (M140I), hDHFR (M1del, N127Y), hDHFR (M1del, I17V), hDHFR (M1del, Y122I), and hDHFR (M1del, K185E). In some embodiments, the mutant protein may comprise two mutations and may be selected from, but not limited to, hDHFR (C7R, Y163C), hDHFR (A10V, H88Y), hDHFR (Q36K, Y122I), hDHFR (M53T, R138I), hDHFR (T57A, I72A), hDHFR (E63G, I176F), hDHFR (G21T, Y122I), hDHFR (L74N, Y122I), hDHFR (V75F, Y122I), hDHFR (L94A, T147A), DHFR (V121A, Y22I), hDHFR (Y122I, A125F), hDHFR (H131R, E144G), hDHFR (T137R, F143L), hDHFR (Y178H, E18IG), and hDHFR (Y183H, K185E), hDHFR (E162G, I176F) hDHFR (M1del, I17V, Y122I), hDHFR (M1del, Y122I, M1400, hDHFR (M1del, N127Y, Y122I), hDHFR (M1del, E162G, I176F), and hDHFR (M1del, H131R, E144G), and hDHFR (M1del, Y122I, A125F). In some embodiments, the mutant may comprise three mutations and the mutant may be selected from hDHFR (V9A, S93R, P150L), hDHFR (I8V, K133E, Y163C), hDHFR (L23S, V121A, Y157C), hDHFR (K19E, F89L, E181G), hDHFR (Q36F, N65F, Y122I), hDHFR (G54R, M140V, S168C), hDHFR (V110A, V136M, K177R), hDHFR (Q36F, Y122I, A125F), hDHFR (N49D, F59S, D153G), and hDHFR (G21E, I72V, I176T), hDHFR (M1del, Q36F, Y122I, A125F), hDHFR (M1del, Y122I, H131R, E144G), hDHFR (M1del, E31D, F32M, V116I), and hDHFR (M1del, Q36F, N65F, Y122I). In some embodiments, the mutant may comprise four or more mutations and the mutant may be selected from hDHFR (V2A, R33G, Q36R, L100P, K185R), hDHFR (M1del, D22S, F32M, R33S, Q36S, N65S), hDHFR (I17N, L98S, K99R, M112T, E151G, E162G, E172G), hDHFR (G16S, I17V, F89L, D96G, K123E, M140V, D146G, K156R), hDHFR (K81R, K99R, L100P, E102G, N108D, K123R, H128R, D142G, F180L, K185E), hDHFR (R138G, D142G, F143S, K156R, K158E, E162G, V166A, K177E, Y178C, K185E, N186S), hDHFR (N14S, P24S, F35L, M53T, K56E, R92G, S93G, N127S, H128Y, F135L, F143S, L159P, L160P, E173A, F180L), hDHFR (F35L, R37G, N65A, L68S, K69E, R71G, L80P, K99G, G117D, L132P, I139V, M140I, D142G, D146G, E173G, D187G), hDHFR (L28P, N30H, M38V, V44A, L68S, N73G, R78G, A97T, K99R, A107T, K109R, D111N, L134P, F135V, T147A, I152V, K158R, E172G, V182A, E184R), hDHFR (V2A, I17V, N30D, E31G, Q36R, F59S, K69E, I72T, H88Y, F89L, N108D, K109E, V110A, 1115V, Y122D, L132P, F135S, M140V, E144G, T147A, Y157C, V170A, K174R, N186S), hDHFR (L100P, E102G, Q103R, P104S, E105G, N108D, V113A, W114R, Y122C, M126I, N127R, H128Y, L132P, F135P, I139T, F148S, F149L, I152V, D153A, D169G, V170A, I176A, K177R, V182A, K185R, N186S), and hDHFR (A10T, Q13R, N14S, N20D, P24S, N30S, M38T, T40A, K47R, N49S, K56R, I61T, K64R, K69R, I72A, R78G, E82G, F89L, D96G, N108D, M112V, W114R, Y122D, K123E, I139V, Q141R, D142G, F148L, E151G, E155G, Y157R, Q171R, Y183C, E184G, K185del, D187N).

[0073] In one embodiment, the stimulus is a small molecule that binds to a SRE to post-translationally regulate protein levels. In one aspect, DHFR ligands: trimethoprim (TMP) and methotrexate (MTX) are used to stabilize hDHFR mutants.

[0074] In some embodiments, DD mutations that do not inhibit ligand binding may be preferentially selected. In some embodiments, ligand binding may be improved by mutation of residues in DHFR.

[0075] In some embodiments, the SREs of the present invention may be derived from oxidoreductases, transferases, polymerases, hydrolases, lyases, isomerases, ligases, direct ligand-gated ion channel receptors, G-protein-coupled receptors, Cytokine receptors, lntegrin receptors, Receptors associated with a tyrosine kinase, Nuclear receptors (steroid hormone receptors), Voltage-gated Calcium channels, Na+ channels Ryanodine-inositol 1,4,5-triphosphate receptor Calcium channel (RIR—CaC) family, Transient receptor potential CaL+ channel (TRP—CC) family, and nucleic acids.

### 2. Stimuli

[0076] Biocircuits of the invention are triggered by one or more stimuli. Stimuli may be selected from a ligand, an externally added or endogenous metabolite, the presence or absence of a defined ligand, pH, temperature, light, ionic strength, radioactivity, cellular location, subject site, microenvironment, the presence or the concentration of one or more metal ions.

[0077] In some embodiments, the stimulus is a ligand. Ligands may be nucleic acid-based, protein-based, lipid based, organic, inorganic or any combination of the foregoing. In some embodiments, the ligand is selected from the group consisting of a protein, peptide, nucleic acid, lipid, lipid derivative, sterol, steroid, metabolite derivative and a small molecule. In some embodiments, the stimulus is a small molecule. In some embodiments, the small molecules are cell permeable.

[0078] In some embodiments, any of the ligands in Table 1 may be useful in the present invention.

[0079] In some aspects, the ligand binds to FKBP. The ligand may be rapamycin, shield-1, Aquashield, and SLF.

[0080] In some embodiments, the ligand binds to dihydrofolate reductase. In some embodiments, the ligand binds to and inhibits dihydrofolate reductase function and is herein referred to as a dihydrofolate inhibitor.

[0081] In some embodiments, the ligand may be a selective inhibitor of human DHFR. Ligands of the invention may also be selective inhibitors of dihydrofolate reductases of bacteria and parasitic organisms such as Pneumocystis spp., Toxoplasma spp., Trypanosoma spp., Mycobacterium spp., and Streptococcus spp. Ligands specific to other DHFR may be modified to improve binding to human dihydrofolate reductase.

[0082] Examples of dihydrofolate inhibitors include, but are not limited to, Trimethoprim (TMP), Methotrexate (MTX), Pralatrexate, Piritrexim Pyrimethamine, Talotrexin, Chloroguanide, Pentamidine, Trimetrexate, aminopterin, C1 898 trihydrochloride, Pemetrexed Disodium, Raltitrexed, Sulfaguanidine, Folotyn, Iclaprim and Diaveridine.

[0083] In some embodiments, ligands include TMP-derived ligands containing portions of the ligand known to mediate binding to DHFR. Ligands may also be modified to reduce off-target binding to other folate metabolism enzymes and increase specific binding to DHFR.

### 3. Payloads: Immunotherapeutic Agents

[0084] In some embodiments, payloads of the present invention may be immunotherapeutic agents that induce immune responses in an organism. The immunotherapeutic agent may be, but is not limited to, an antibody and fragments and variants thereof, a chimeric antigen receptor (CAR), a chimeric switch receptor, a cytokine, chemokine, a cytokine receptor, a chemokine receptor, a cytokine-cytokine receptor fusion polypeptide, or any agent that induces an immune response. In one embodiment, the immunotherapeutic agent induces an anti-cancer immune response in a cell, or in a subject.

[0085] The biocircuits of the present invention may be monocistronic or multicistronic meaning one (monocistronic) or more than one (multicistronic) message (e.g. payload of interest) is produced. If two messages are produced, the biocircuit or effector module is considered bicistronic.

### Antibodies

[0086] In some embodiments, antibodies, fragments and variants thereof are payloads of the present invention.

[0087] In some embodiments, stability of the antibodies, or antibody fragments described herein can be evaluated for their stability. e.g. thermal stability. In some aspects, the antibodies described herein may be engineered to have increased thermal stability than a control binding molecule (e.g. a conventional scFv). Enhanced thermal stability has been associated with improved therapeutic properties of the antibody, antibody fragments, and/or the chimeric antigen receptors that contain the antibody fragments. Stability of the antibodies may be altered by mutagenesis of select amino acids within the antibody and stability i.e. thermal stability may be measured by method known in the art. Binding affinity and aggregation properties of the antibodies may be evaluated after engineering mutations, to ensure that these properties are not altered.

### Antibody Fragments and Variants

[0088] In some embodiments, antibody fragments and variants may comprise antigen binding regions from intact antibodies. Examples of antibody fragments and variants may include, but are not limited to Fab, Fab′, F(ab′)2, and Fv fragments; diabodies; linear antibodies; single-chain antibody molecules such as single chain variable fragment (scFv); and multispecific antibodies formed from antibody fragments. Papain digestion of antibodies produces two identical antigen-binding fragments, called “Fab” fragments, each with a single antigen-binding site. Also produced is a residual “Fc” fragment, whose name reflects its ability to crystallize readily. Pepsin treatment yields an F(ab′)2 fragment that has two antigen-binding sites and is still capable of cross-linking with the antigen. Pharmaceutical compositions, biocircuits, biocircuit components, effector modules including their SREs or payloads of the present invention may comprise one or more of these fragments.

[0089] For the purposes herein, an “antibody” may comprise a heavy and light variable domain as well as an Fc region. As used herein, the term “native antibody” usually refers to a heterotetrameric glycoprotein of about 150,000 daltons, composed of two identical light (L) chains and two identical heavy (H) chains. Each light chain is linked to a heavy chain by one covalent disulfide bond, while the number of disulfide linkages varies among the heavy chains of different immunoglobulin isotypes. Each heavy and light chain also has regularly spaced intrachain disulfide bridges. Each heavy chain has at one end a variable domain (VH) followed by a number of constant domains. Each light chain has a variable domain at one end (VL) and a constant domain at its other end; the constant domain of the light chain is aligned with the first constant domain of the heavy chain, and the light chain variable domain is aligned with the variable domain of the heavy chain.

[0090] As used herein, the term “variable domain” refers to specific antibody domains found on both the antibody heavy and light chains that differ extensively in sequence among antibodies and are used in the binding and specificity of each particular antibody for its particular antigen. Variable domains comprise hypervariable regions. As used herein, the term “hypervariable region” refers to a region within a variable domain comprising amino acid residues responsible for antigen binding. The amino acids present within the hypervariable regions determine the structure of the complementarity determining regions (CDRs) that become part of the antigen-binding site of the antibody. As used herein, the term “CDR” refers to a region of an antibody comprising a structure that is complimentary to its target antigen or epitope. Other portions of the variable domain, not interacting with the antigen, are referred to as framework (FW) regions. The antigen-binding site (also known as the antigen combining site or paratope) comprises the amino acid residues necessary to interact with a particular antigen. The exact residues making up the antigen-binding site are typically elucidated by co-crystallography with bound antigen, however computational assessments based on comparisons with other antibodies can also be used (Strohl, W. R. Therapeutic Antibody Engineering. Woodhead Publishing, Philadelphia Pa. 2012. Ch. 3, p 47-54, the contents of which are herein incorporated by reference in their entirety). Determining residues that make up CDRs may include the use of numbering schemes including, but not limited to, those taught by Kabat (Wu et al., JFM, 1970, 132(2):211-250 and Johnson et al., Nucleic Acids Res. 2000, 28(1): 214-218, the contents of each of which are herein incorporated by reference in their entirety), Chothia (Chothia and Lesk, J. Mol. Biol. 1987, 196, 901, Chothia et al., Nature, 1989, 342, 877, and Al-Lazikani et al., J. Mol. Biol. 1997, 273(4): 927-948, the contents of each of which are herein incorporated by reference in their entirety), Lefranc (Lefranc et al., Immunome Res. 2005, 1:3) and Honegger (Honegger and Pluckthun, J. Mol. Biol. 2001, 309(3): 657-70, the contents of which are herein incorporated by reference in their entirety).

[0091] VH and VL domains have three CDRs each. VL CDRs are referred to herein as CDR-L1, CDR-L2 and CDR-L3, in order of occurrence when moving from N to C terminus along the variable domain polypeptide. VH CDRs are referred to herein as CDR-H1, CDR-H2 and CDR-H3, in order of occurrence when moving from N to C terminus along the variable domain polypeptide. Each of CDRs has favored canonical structures with the exception of the CDR-H3, which comprises amino acid sequences that may be highly variable in sequence and length between antibodies resulting in a variety of three-dimensional structures in antigen-binding domains (Nikoloudis, et al., PeerJ. 2014, 2: e456). In some cases, CDR-H3s may be analyzed among a panel of related antibodies to assess antibody diversity. Various methods of determining CDR sequences are known in the art and may be applied to known antibody sequences (Strohl, W. R. Therapeutic Antibody Engineering. Woodhead Publishing, Philadelphia Pa. 2012. Ch. 3, p 47-54, the contents of which are herein incorporated by reference in their entirety).

[0092] As used herein, the term “Fv” refers to an antibody fragment comprising the minimum fragment on an antibody needed to form a complete antigen-binding site. These regions consist of a dimer of one heavy chain and one light chain variable domain in tight, non-covalent association. Fv fragments can be generated by proteolytic cleavage but are largely unstable. Recombinant methods are known in the art for generating stable Fv fragments, typically through insertion of a flexible linker between the light chain variable domain and the heavy chain variable domain (to form a single chain Fv (scFv)) or through the introduction of a disulfide bridge between heavy and light chain variable domains (Strohl, W. R. Therapeutic Antibody Engineering. Woodhead Publishing, Philadelphia Pa. 2012. Ch. 3, p 46-4′7, the contents of which are herein incorporated by reference in their entirety).

[0093] As used herein, the term “light chain” refers to a component of an antibody from any vertebrate species assigned to one of two clearly distinct types, called kappa and lambda based on amino acid sequences of constant domains. Depending on the amino acid sequence of the constant domain of their heavy chains, antibodies can be assigned to different classes. There are five major classes of intact antibodies: IgA, IgD, IgE, IgG, and IgM, and several of these may be further divided into subclasses (isotypes), e.g., IgG1, IgG2, IgG3, IgG4, IgA, and IgA2.

[0094] As used herein, the term “single chain Fv” or “scFv” refers to a fusion protein of VH and VL antibody domains, wherein these domains are linked together into a single polypeptide chain by a flexible peptide linker. In some embodiments, the Fv polypeptide linker enables the scFv to form the desired structure for antigen binding. In some embodiments, scFvs are utilized in conjunction with phage display, yeast display or other display methods where they may be expressed in association with a surface member (e.g. phage coat protein) and used in the identification of high affinity peptides for a given antigen.

[0095] Using molecular genetics, two scFvs can be engineered in tandem into a single polypeptide, separated by a linker domain, called a “tandem scFv” (tascFv). Construction of a tascFv with genes for two different scFvs yields a “bispecific single-chain variable fragments” (bis-scFvs). Only two tascFvs have been developed clinically by commercial firms; both are bispecific agents in active early phase development by Micromet for oncologic indications and are described as “Bispecific T-cell Engagers (BiTE).” Blinatumomab is an anti-CD19/anti-CD3 bispecific tascFv that potentiates T-cell responses to B-cell non-Hodgkin lymphoma in Phase 2. MT110 is an anti-EP-CAM/anti-CD3 bispecific tascFv that potentiates T-cell responses to solid tumors in Phase 1. Bispecific, tetravalent “TandAbs” are also being researched by Affimed (Nelson, A. L., MAbs., 2010, January-February; 2(1):77-83). maxibodies (bivalent scFv fused to the amino terminus of the Fc (CH2-CH3 domains) of IgG may also be included.

[0096] The term “intrabody” refers to a form of antibody that is not secreted from a cell in which it is produced, but instead targets one or more intracellular proteins. Intrabodies may be used to affect a multitude of cellular processes including, but not limited to intracellular trafficking, transcription, translation, metabolic processes, proliferative signaling and cell division. In some embodiments, methods of the present invention may include intrabody-based therapies. In some such embodiments, variable domain sequences and/or CDR sequences disclosed herein may be incorporated into one or more constructs for intrabody-based therapy.

[0097] As used herein, the term “monoclonal antibody” refers to an antibody obtained from a population of substantially homogeneous cells (or clones), i.e., the individual antibodies comprising the population are identical and/or bind the same epitope, except for possible variants that may arise during production of the monoclonal antibodies, such variants generally being present in minor amounts. In contrast to polyclonal antibody preparations that typically include different antibodies directed against different determinants (epitopes), each monoclonal antibody is directed against a single determinant on the antigen.

[0098] The modifier “monoclonal” indicates the character of the antibody as being obtained from a substantially homogeneous population of antibodies and is not to be construed as requiring production of the antibody by any particular method. The monoclonal antibodies herein include “chimeric” antibodies (immunoglobulins) in which a portion of the heavy and/or light chain is identical with or homologous to corresponding sequences in antibodies derived from a particular species or belonging to a particular antibody class or subclass, while the remainder of the chain(s) is identical with or homologous to corresponding sequences in antibodies derived from another species or belonging to another antibody class or subclass, as well as fragments of such antibodies.

[0099] As used herein, the term “humanized antibody” refers to a chimeric antibody comprising a minimal portion from one or more non-human (e.g., murine) antibody source(s) with the remainder derived from one or more human immunoglobulin sources. For the most part, humanized antibodies are human immunoglobulins (recipient antibody) in which residues from the hypervariable region from an antibody of the recipient are replaced by residues from the hypervariable region from an antibody of a non-human species (donor antibody) such as mouse, rat, rabbit or nonhuman primate having the desired specificity, affinity, and/or capacity. In one embodiment, the antibody may be a humanized full-length antibody.

[0100] As used herein, the term “antibody variant” refers to a modified antibody (in relation to a native or starting antibody) or a biomolecule resembling a native or starting antibody in structure and/or function (e.g., an antibody mimetic). Antibody variants may be altered in their amino acid sequence, composition or structure as compared to a native antibody. Antibody variants may include, but are not limited to, antibodies with altered isotypes (e.g., IgA, IgD, IgE, IgG1, IgG2, IgG3, IgG4, or IgM), humanized variants, optimized variants, multispecific antibody variants (e.g., bispecific variants), and antibody fragments.

[0101] In one embodiment, the antibody may comprise a modified Fc region. As a non-limiting example, the modified Fc region may be made by the methods or may be any of the regions described in US Patent Publication NO. US20150065690, the contents of which are herein incorporated by reference in its entirety.

[0102] In some embodiments, payloads may encode antibodies comprising a single antigen-binding domain. These molecules are extremely small, with molecular weights approximately one-tenth of those observed for full-sized mAbs.

[0103] In some embodiments, payloads of the invention may encode intrabodies. Intrabodies are a form of antibody that is not secreted from a cell in which it is produced, but instead targets one or more intracellular proteins. Intrabodies are expressed and function intracellularly and may be used to affect a multitude of cellular processes including, but not limited to intracellular trafficking, transcription, translation, metabolic processes, proliferative signaling and cell division. In some embodiments, methods described herein include intrabody-based therapies. In some such embodiments, variable domain sequences and/or CDR sequences disclosed herein are incorporated into one or more constructs for intrabody-based therapy. For example, intrabodies may target one or more glycated intracellular proteins or may modulate the interaction between one or more glycated intracellular proteins and an alternative protein.

[0104] The intracellular expression of intrabodies in different compartments of mammalian cells allows blocking or modulation of the function of endogenous molecules (Biocca, et al., EMBO J. 1990, 9: 101-108; Colby et al., Proc. Natl. Acad. Sci. U.S.A. 2004, 101: 17616-17621). Intrabodies can alter protein folding, protein-protein, protein-DNA, protein-RNA interactions and protein modification. They can induce a phenotypic knockout and work as neutralizing agents by direct binding to the target antigen, by diverting its intracellular trafficking or by inhibiting its association with binding partners. With high specificity and affinity to target antigens, intrabodies have advantages to block certain binding interactions of a particular target molecule, while sparing others.

[0105] In one embodiment, the antibody may be a conditionally active biologic protein. An antibody may be used to generate a conditionally active biologic protein which are reversibly or irreversibly inactivated at the wild type normal physiological conditions as well as to such conditionally active biologic proteins and uses of such conditional active biologic proteins are provided. In some embodiments, SREs and/or payloads of the invention may include a cell-penetrating antibody. Cell-penetrating antibodies are antibodies, or antibody fragments or variants, that are capable of passing through cellular membrane and entering into cells.

### Antibody Preparations

[0106] The preparation of antibodies, whether monoclonal or polyclonal, is known in the art. Techniques for the production of antibodies are well known in the art and described, e.g. in Harlow and Lane “Antibodies, A Laboratory Manual”, Cold Spring Harbor Laboratory Press, 1988; Harlow and Lane “Using Antibodies: A Laboratory Manual” Cold Spring Harbor Laboratory Press, 1999 and “Therapeutic Antibody Engineering: Current and Future Advances Driving the Strongest Growth Area in the Pharmaceutical Industry” Woodhead Publishing, 2012.

[0107] The antibodies and fragments and variants thereof as described herein can be produced using recombinant polynucleotides. In one embodiment, the polynucleotides have a modular design to encode at least one of the antibodies, fragments or variants thereof. As a non-limiting example, the polynucleotide construct may encode any of the following designs: (1) the heavy chain of an antibody, (2) the light chain of an antibody, (3) the heavy and light chain of the antibody, (4) the heavy chain and light chain separated by a linker, (5) the VH1, CH1, CH2, CH3 domains, a linker and the light chain or (6) the VH1, CH1, CH2, CH3 domains, VL region, and the light chain. Any of these designs may also comprise optional linkers between any domain and/or region. The polynucleotides of the present invention may be engineered to produce any standard class of immunoglobulins using an antibody described herein or any of its component parts as a starting molecule.

[0108] Recombinant antibody fragments may also be isolated from phage antibody libraries using techniques well known in the art and described in e.g. Clackson et al., 1991, Nature 352: 624-628; Marks et al., 1991, J. Mol. Biol. 222: 581-597. Recombinant antibody fragments may be derived from large phage antibody libraries generated by recombination in bacteria (Sblattero and Bradbury, 2000, Nature Biotechnology 18:75-80; the contents of which are incorporated herein by reference in its entirety).

### Antibodies Used for Immunotherapy

[0109] In some embodiments, payloads of the present invention may be antibodies, fragments and variants thereof which are specific to tumor specific antigens (TSAs) and tumor associated antigens (TAAs). Antibodies circulate throughout the body until they find and attach to the TSA/TAA. Once attached, they recruit other parts of the immune system, increasing ADCC (antibody dependent cell-mediated cytotoxicity) and ADCP (antibody dependent cell-mediated phagocytosis) to destroy tumor cells. As used herein, the term “tumor specific antigen (TSA)” means an antigenic substance produced in tumor cells, which can trigger an anti-tumor immune response in a host organism. In one embodiment, a TSA may be a tumor neoantigen. The tumor antigen specific antibody mediates complement-dependent cytotoxic response against tumor cells expressing the same antigen.

[0110] In some embodiments, the tumor specific antigens (TSAs), tumor associated antigens (TAAs), pathogen associated antigens, or fragments thereof can be expressed as a peptide or as an intact protein or portion thereof. The intact protein or a portion thereof can be native or mutagenized. Antigens associated with cancers or virus-induced cancers as described herein are well-known in the art. Such a TSA or TAA may be previously associated with a cancer or may be identified by any method known in the art.

[0111] In one embodiment, the antigen is CD19, a B-cell surface protein expressed throughout B-cell development. CD19 is a well-known B cell surface molecule, which upon B cell receptor activation enhances B-cell antigen receptor induced signaling and expansion of B cell populations. CD19 is broadly expressed in both normal and neoplastic B cells. Malignancies derived from B cells such as chronic lymphocytic leukemia, acute lymphocytic leukemia and many non-Hodgkin lymphomas frequently retain CD19 expression. This near universal expression and specificity for a single cell lineage has made CD19 an attractive target for immunotherapies. Human CD19 has 14 exons wherein exon 1-4 encode the extracellular portion of the CD19, exon 5 encodes the transmembrane portion of CD19 and exons 6-14 encode the cytoplasmic tail.

[0112] In one embodiment, payloads of the present invention may be antibodies, fragments and variants thereof which are specific to CD19 antigen.

[0113] In some embodiments, the immunotherapeutic agent may be an antibody that is specifically immunoreactive to an antigen selected from a tumor specific antigen (TSA), a tumor associated antigen (TAA), or an antigenic epitope.

[0114] In one aspect, the antigen may be an antigenic epitope. In some embodiments, the antigenic epitope may be CD19.

[0115] In some embodiments, the antibody may comprise a heavy chain variable region having an amino acid sequence independently selected from the group consisting of any of SEQ ID NOs. 9-40 and a light chain variable region having an amino acid sequence independently selected from the group consisting of any of SEQ ID NOs. 41-82. In one aspect, the antibody may comprise an amino acid sequence selected from the group consisting of any of SEQ ID NOs. 83-227 and 465.

[0116] In one aspect, the first effector module may comprise the amino acid sequence of any of SEQ ID NO. 475-489, 804-810, 813-817 and 948-1029.

[0117] A tumor specific antigen (TSA) may be a tumor neoantigen. A neoantigen is a mutated antigen that is only expressed by tumor cells because of genetic mutations or alterations in transcription which alter protein coding sequences, therefore creating novel, foreign antigens. The genetic changes result from genetic substitution, insertion, deletion or any other genetic changes of a native cognate protein (i.e. a molecule that is expressed in normal cells). In the context of CD19, neoantigens such as a transcript variant of CD19 lacking exon 2 or lacking exon 5-6 or both have been described (see International patent publication No. WO2016061368; the contents of which are incorporated herein by reference in their entirety). Since FMC63 binding epitope is in exon 2, CD19 neoantigen lacking exon 2 is not recognized by FMC63 antibody. Thus, in some embodiments, payloads of the invention may include FMC63-distinct antibodies, or fragments thereof. As used herein “FMC63-distinct” refers, to an antibody or fragment thereof that is immunologically specific and binds to an epitope of the CD19 antigen that is different or unlike the epitope of CD19 antigen that is bound by FMC63. In some instances, antibodies of the invention may include CD19 antibodies, antibody fragments or variants that recognize CD19 neoantigens including the CD19 neoantigen lacking exon2. In one embodiment, the antibody or fragment thereof is immunologically specific to the CD19 encoded by exon 1, 3 and/or 4. In one example, the antibody or fragment thereof is specific to the epitope that bridges the portion of CD19 encoded by exon 1 and the portion of CD19 encoded by exon 3.

### Chimeric Antigen Receptors (CARs)

[0118] In some embodiments, payloads of the present invention may be a chimeric antigen receptors (CARs) which when transduced into immune cells (e.g., T cells and NK cells), can re-direct the immune cells against the target (e.g., a tumor cell) which expresses a molecule recognized by the extracellular target moiety of the CAR.

[0119] As used herein, the term “chimeric antigen receptor (CAR)” refers to a synthetic receptor that mimics TCR on the surface of T cells. In general, a CAR is composed of an extracellular targeting domain, a transmembrane domain/region and an intracellular signaling/activation domain. In a standard CAR receptor, the components: the extracellular targeting domain, transmembrane domain and intracellular signaling/activation domain, are linearly constructed as a single fusion protein. The extracellular region comprises a targeting domain/moiety (e.g., a scFv) that recognizes a specific tumor antigen or other tumor cell-surface molecules. The intracellular region may contain a signaling domain of TCR complex (e.g., the signal region of CD3), and/or one or more costimulatory signaling domains, such as those from CD28, 4-1BB (CD137) and OX-40 (CD134). For example, a “first-generation CAR” only has the CD3 signaling domain. In an effort to augment T-cell persistence and proliferation, costimulatory intracellular domains are added, giving rise to second generation CARs having a CD3ξ signal domain plus one costimulatory signaling domain, and third generation CARs having CD3ξ signal domain plus two or more costimulatory signaling domains. A CAR, when expressed by a T cell, endows the T cell with antigen specificity determined by the extracellular targeting moiety of the CAR. Recently, it is also desirable to add one or more elements such as homing and suicide genes to develop a more competent and safer architecture of CAR, so called the fourth-generation CAR.

[0120] In some embodiments, the immunotherapeutic agent of the effector module is a chimeric antigen receptor (CAR). The chimeric antigen receptor may comprise an extracellular target moiety; a transmembrane domain; an intracellular signaling domain; and optionally, one or more co-stimulatory domains.

[0121] In some embodiments, the extracellular targeting domain is joined through the hinge (also called space domain or spacer) and transmembrane regions to an intracellular signaling domain. The hinge connects the extracellular targeting domain to the transmembrane domain which transverses the cell membrane and connects to the intracellular signaling domain. The hinge may need to be varied to optimize the potency of CAR transformed cells toward cancer cells due to the size of the target protein where the targeting moiety binds, and the size and affinity of the targeting domain itself. Upon recognition and binding of the targeting moiety to the target cell, the intracellular signaling domain leads to an activation signal to the CAR T cell, which is further amplified by the “second signal” from one or more intracellular costimulatory domains. The CAR T cell, once activated, can destroy the target cell.

[0122] In some embodiments, the CAR of the present invention may be split into two parts, each part is linked a dimerizing domain, such that an input that triggers the dimerization promotes assembly of the intact functional receptor.

[0123] In some embodiments, the CAR of the present invention may be designed as an inducible CAR.

[0124] According to the present invention, the payload of the present invention may be a first-generation CAR, or a second-generation CAR, or a third-generation CAR, or a fourth-generation CAR. In some embodiments, the payload of the present invention may be a full CAR construct composed of the extracellular domain, the hinge and transmembrane domain and the intracellular signaling region. In other embodiments, the payload of the present invention may be a component of the full CAR construct including an extracellular targeting moiety, a hinge region, a transmembrane domain, an intracellular signaling domain, one or more co-stimulatory domain, and other additional elements that improve CAR architecture and functionality including but not limited to a leader sequence, a homing element and a safety switch, or the combination of such components.

[0125] CARs regulated by biocircuits and compositions of the present invention are tunable and thereby offer several advantages. The reversible on-off switch mechanism allows management of acute toxicity caused by excessive CAR-T cell expansion. Pulsatile CAR expression using SREs of the present invention may be achieved by cycling ligand level. The ligand conferred regulation of the CAR may be effective in offsetting tumor escape induced by antigen loss, avoiding functional exhaustion caused by tonic signaling due to chronic antigen exposure and improving the persistence of CAR expressing cells in vivo.

[0126] In some embodiments, biocircuits and compositions of the invention may be utilized to down regulate CAR expression to limit on target on tissue toxicity caused by tumor lysis syndrome. Down regulating the expression of the CARs of the present invention following anti-tumor efficacy may prevent (1) On target off tumor toxicity caused by antigen expression in normal tissue, (2) antigen independent activation in vivo.

[0127] In one embodiment, selection of a CAR with a lower affinity may provide more T cell signaling and less toxicity.

### Extracellular Targeting Domain/Moiety

[0128] In accordance with the invention, the extracellular target moiety of a CAR may be any agent that recognizes and binds to a given target molecule, for example, a neoantigen on tumor cells, with high specificity and affinity. The target moiety may be an antibody and variants thereof that specifically binds to a target molecule on tumor cells, or a peptide aptamer selected from a random sequence pool based on its ability to bind to the target molecule on tumor cells, or a variant or fragment thereof that can bind to the target molecule on tumor cells, or an antigen recognition domain from native T-cell receptor (TCR) (e.g. CD4 extracellular domain to recognize HIV infected cells), or exotic recognition components such as a linked cytokine that leads to recognition of target cells bearing the cytokine receptor, or a natural ligand of a receptor.

[0129] In some embodiments, the targeting domain of a CAR may be a Ig NAR, a Fab fragment, a Fab′ fragment, a F(ab)′2 fragment, a F(ab)′3 fragment, Fv, a single chain variable fragment (scFv), a bis-scFv, a (scFv)2, a minibody, a diabody, a triabody, a tetrabody, a disulfide stabilized Fv protein (dsFv), a unitbody, a nanobody, or an antigen binding region derived from an antibody that specifically recognizes a target molecule, for example a tumor specific antigen (TSA). In one embodiment, the targeting moiety is a scFv. The scFv domain, when it is expressed on the surface of a CAR T cell and subsequently binds to a target protein on a cancer cell, is able to maintain the CAR T cell in proximity to the cancer cell and to trigger the activation of the T cell. A scFv can be generated using routine recombinant DNA technology techniques and is discussed in the present invention.

[0130] In some embodiments, natural ligands may be used as the targeting moieties of the CARs of the present invention. Such natural ligands may be capable of binding to the antigens with affinity in the range of the scFvs and can redirect T cells specificity and effector functions to target cells expressing the complementary receptor.

[0131] In one embodiment, the targeting moiety of the CAR may recognize CD19. CD19 is a well-known B cell surface molecule, which upon B cell receptor activation enhances B-cell antigen receptor induced signaling and expansion of B cell populations. CD19 is broadly expressed in both normal and neoplastic B cells. Malignancies derived from B cells such as chronic lymphocytic leukemia, acute lymphocytic leukemia and many non-Hodgkin lymphomas frequently retain CD19 expression. This near universal expression and specificity for a single cell lineage has made CD19 an attractive target for immunotherapies. Human CD19 has 14 exons wherein exon 1-4 encode the extracellular portion of the CD19, exon 5 encodes the transmembrane portion of CD19 and exons 6-14 encode the cytoplasmic tail. In one embodiment, the targeting moiety may comprise scFvs derived from the variable regions of the FMC63 antibody. FMC63 is an IgG2a mouse monoclonal antibody clone specific to the CD19 antigen that reacts with CD19 antigen on cells of the B lineage. The epitope of CD19 recognized by the FMC63 antibody is in exon 2 (Sotillo et al (2015) Cancer Discov; 5(12):1282-95; the contents of which are incorporated by reference in their entirety). In some embodiments, the targeting moiety of the CAR may be derived from the variable regions of other CD19 monoclonal antibody clones including but not limited to 4G7, SJ25C1, CVID3/429, CVID3/155, HIB19, and J3-119.

[0132] In some embodiments, the targeting moiety of a CAR may recognize a tumor specific antigen (TSA), for example a cancer neoantigen that is only expressed by tumor cells because of genetic mutations or alterations in transcription which alter protein coding sequences, therefore creating novel, foreign antigens. The genetic changes result from genetic substitution, insertion, deletion or any other genetic changes of a native cognate protein (i.e. a molecule that is expressed in normal cells). In the context of CD19, TSAs may include a transcript variant of human CD19 lacking exon 2 or lacking exon 5-6 or both (see International patent publication No. WO2016061368; the contents of which are incorporated herein by reference in their entirety). Since FMC63 binding epitope is in exon 2, CD19 lacking exon 2 is not recognized by FMC63 antibody. Thus, in some embodiments, the targeting moiety of the CAR may be an FMC63-distinct scFv. As used herein “FMC63-distinct” refers, to an antibody, scFv or a fragment thereof that is immunologically specific and binds to an epitope of the CD19 antigen that is different or unlike the epitope of CD19 antigen that is bound by FMC63. In some instances, targeting moiety may recognize a CD19 antigen lacking exon2. In one embodiment, the targeting moiety recognizes a fragment of CD19 encoded by exon 1, 3 and/or 4. In one example, the targeting moiety recognizes the epitope that bridges the portion of CD19 encoded by exon 1 and the portion of CD19 encoded by exon 3.

[0133] In one aspect, the extracellular target moiety may be an scFv derived from an antibody. In one aspect, the scFv may specifically bind to a CD19 antigen. In one aspect, the scFv of the CAR may be a CD19 scFv. In some embodiments, the CD19 scFv may comprise a heavy chain variable region having an amino acid sequence independently selected from the group consisting of SEQ ID NO. 49-80, and a light chain variable region having an amino acid sequence independently selected from the group consisting of any of SEQ ID NOs. 81-122. In some embodiments, the CD19 scFv may comprise an amino acid sequence selected from the group consisting of any of SEQ ID NOs. 123-267 and 624.

[0134] In some embodiments, the CD19 scFvs may be selected from any of the sequences described in Table 2. In Table 2, * at the end of the amino acid sequence indicates the translation of the stop codon, and X denotes any amino acid.

TABLE 2
CD19 scFv sequences

| scFv | | | Amino | Nucleic |
|---|---|---|---|---|
| clone | Target | Amino Acid | Acid | Acid |
| name | | Sequence | SEQ ID | SEQ ID |
| T1_G4 | CD19 | GAHAQPVLTQ | 1034 | 1037 |
| | | PPSVSVAPGQ | | |
| | | TAKITCGGNN | | |
| | | IGSKSVHWYQ | | |
| | | QKPGQAPVLV | | |
| | | VYDDSDRPSG | | |
| | | IPERFSGSNS | | |
| | | GNAATLTISR | | |
| | | VEAGDEADYY | | |
| | | CQVWDSSSGL | | |
| | | VFGTGTKVTV | | |
| | | LSGGSTITSY | | |
| | | NVYDTKLSSS | | |
| | | GTEVQLLESG | | |
| | | AEVKKPGESL | | |
| | | KISCKGSGYS | | |
| | | FTSYWIGWVR | | |
| | | QMPGKGLEWM | | |
| | | GIIYPGDSDT | | |
| | | RYSPSSQGQV | | |
| | | TISADKSIST | | |
| | | AYLRWSGLKA | | |
| | | SDTAMYYCAR | | |
| | | VSSDSGAFDI | | |
| | | WGQGTMVTVS | | |
| | | SASGKPIPNP | | |
| | | LLGLDSTHHH | | |
| | | HHH* | | |
| A8_F1 | CD19 | MKYLLPTAAA | 1035 | 1038 |
| | | GLLLLAASGA | | |
| | | HASYELTQPP | | |
| | | SVSVAPGKTA | | |
| | | TIPCGGNNIE | | |
| | | SKSVHWYQQR | | |
| | | PGQAPVLVIY | | |
| | | DDTDRPSGIP | | |
| | | ERFSGSNSGN | | |
| | | TATLTISGVE | | |
| | | AGDEADYFCQ | | |
| | | VWDSHSDHEV | | |
| | | FGGGTKLTVL | | |
| | | SGGSTITSYN | | |
| | | VYYTKLSSSG | | |
| | | SEVQLVETGG | | |
| | | GLVQPGGSLR | | |
| | | LSCAASGFTF | | |
| | | SSYEMNWVRQ | | |
| | | APGKGLEWVS | | |
| | | YISSSGSTIY | | |
| | | YADSVKGRFT | | |
| | | ISRDNAKNSL | | |
| | | YLQMNSLRAE | | |
| | | DTAVYYCARE | | |
| | | HEWEAGAFDI | | |
| | | WGQGTMVTVS | | |
| | | SASGKPIPNP | | |
| | | LLGLDSTHHH | | |
| | | HHH* | | |
| A8_F2 | CD19 | GAHASYELTQ | 1036 | |
| | | PPSVSVAPGK | | |
| | | TATIPCGGNN | | |
| | | IESKSVHWYQ | | |
| | | QRPGQAPVLV | | |
| | | IYDDTDRPSG | | |
| | | IPERFSGSNS | | |
| | | GNTATLTISG | | |
| | | VEAGDEADYF | | |
| | | CQVWDSHSDH | | |
| | | EVFGGGTKLT | | |
| | | VLSGGSTITS | | |
| | | YNVYYTKLSS | | |
| | | SGSEVQLVET | | |
| | | GGGLVQPGGS | | |
| | | LRLSCAASGF | | |
| | | TFSSYEMNWV | | |
| | | RQAPGKGLEW | | |
| | | VSYISSSGST | | |
| | | IYYADSVKGR | | |
| | | FTISRDNAKN | | |
| | | SLYLQMNSLR | | |
| | | AEDTAVYYCA | | |
| | | REHEWXAGAF | | |
| | | DIWGXGTMVT | | |
| | | VSSASGKPIP | | |
| | | NPLLGLDSTH | | |
| | | HHHHH* | | |

[0135] In some embodiments, scFvs with at least 70% identity to the amino acid sequence of the scFvs disclosed in Table 2, may be used in the present invention. In some embodiments, scFvs with at least 75%, at least 80%, at least 85%, at least 90%, and at least 95% identity to the amino acid sequence of the scFvs described in Table 2 may be useful in the present invention.

[0136] The antigen-binding site (also known as the antigen combining site or paratope) of the scFv described in Table 2 may comprise the amino acid residues necessary to interact with a CD19 antigen. The exact residues making up the antigen-binding site may be elucidated by co-crystallography with bound antigen, however computational assessments based on comparisons with other antibodies may also be used (Strohl, W. R. Therapeutic Antibody Engineering. Woodhead Publishing, Philadelphia Pa. 2012. Ch. 3, p 47-54, the contents of which are herein incorporated by reference in their entirety). Determining residues that make up CDRs may include the use of numbering schemes including, but not limited to, those taught by Kabat (Wu et al., JEM, 1970, 132(2):211-250 and Johnson et al., Nucleic Acids Res. 2000, 28(1): 214-218, the contents of each of which are herein incorporated by reference in their entirety), Chothia (Chothia and Lesk, J. Mol. Biol. 1987, 196, 901, Chothia et al., Nature, 1989, 342, 877, and A1-Lazikani et al., J. Mol. Biol. 1997, 273(4): 927-948, the contents of each of which are herein incorporated by reference in their entirety), Lefranc (Lefranc et al., Immunome Res. 2005, 1:3) and Honegger (Honegger and Pluckthun, J. Mol. Biol. 2001, 309(3): 657-70, the contents of which are herein incorporated by reference in their entirety).

[0137] VH and VL domains have three CDRs each. In some cases, CDR-H3s may be analyzed among a panel of related antibodies to assess antibody diversity. Various methods of determining CDR sequences are known in the art and may be applied to known antibody sequences (Strohl, W. R. Therapeutic Antibody Engineering. Woodhead Publishing, Philadelphia Pa. 2012. Ch. 3, p 47-54, the contents of which are herein incorporated by reference in their entirety). One or more nucleotide of the scFv clones described in Table 2 may be mutated to generate additional scFvs with enhanced affinity for CD19. In some embodiments, mutations may be engineered in one or more of the scFvs described in Table 2, to decrease the affinity of the scFv.

### Intracellular Signaling Domains

[0138] The intracellular domain of a CAR fusion polypeptide, after binding to its target molecule, transmits a signal to the immune effector cell, activating at least one of the normal effector functions of immune effector cells, including cytolytic activity (e.g., cytokine secretion) or helper activity. Therefore, the intracellular domain comprises an “intracellular signaling domain” of a T cell receptor (TCR).

[0139] In some aspects, the entire intracellular signaling domain can be employed. In other aspects, a truncated portion of the intracellular signaling domain may be used in place of the intact chain as long as it transduces the effector function signal.

[0140] In some embodiments, the intracellular signaling domain of the present invention may contain signaling motifs which are known as immunoreceptor tyrosine-based activation motifs (ITAMs). Examples of ITAM containing cytoplasmic signaling sequences include those derived from TCR CD3zeta, FcR gamma, FcR beta, CD3 gamma, CD3 delta, CD3 epsilon, CD5, CD22, CD79a, CD79b, and CD66d. In one example, the intracellular signaling domain is a CD3 zeta (CD3) signaling domain.

[0141] In some embodiments, the intracellular region of the present invention further comprises one or more costimulatory signaling domains which provide additional signals to the immune effector cells. These costimulatory signaling domains, in combination with the signaling domain can further improve expansion, activation, memory, persistence, and tumor-eradicating efficiency of CAR engineered immune cells (e.g., CAR T cells). In some cases, the costimulatory signaling region contains 1, 2, 3, or 4 cytoplasmic domains of one or more intracellular signaling and/or costimulatory molecules. The costimulatory signaling domain may be the intracellular/cytoplasmic domain of a costimulatory molecule, including but not limited to CD2, CD7, CD27, CD28, 4-1BB (CD137), OX40 (CD134), CD30, CD40, ICOS (CD278), GITR (glucocorticoid-induced tumor necrosis factor receptor), LFA-1 (lymphocyte function-associated antigen-1), LIGHT, NKG2C, B7-H3. In one example, the costimulatory signaling domain is derived from the cytoplasmic domain of CD28. In another example, the costimulatory signaling domain is derived from the cytoplasmic domain of 4-1BB (CD137).

[0142] In some embodiments, the intracellular region of the present invention may comprise a functional signaling domain from a protein selected from the group consisting of an MHC class I molecule, a TNF receptor protein, an immunoglobulin-like protein, a cytokine receptor, an integrin, a signaling lymphocytic activation protein (SLAM) such as CD48, CD229, 2B4, CD84, NTB-A, CRACC, BLAME, CD2F-10, SLAMF6, SLAMF7, an activating NK cell receptor, BTLA, a Toll ligand receptor, OX40, CD2, CD7, CD27, CD28, CD30, CD40, CDS, ICAM-1, LFA-1 (CD11a/CD18), 4-1BB (CD137), B7-H3, CDS, ICAM-1, ICOS (CD278), GITR, BAFFR, LIGHT, HVEM (LIGHTR), SLAMF7, NKp80 (KLRF1), NKp44, NKp30, NKp46, CD19, CD4, CD8alpha, CD8beta, IL2R beta, IL2R gamma, IL7R alpha, IL15Ra, ITGA4, VLA1, CD49a, ITGA4, IA4, CD49D, ITGA6, VLA-6, CD49f, ITGAD, CD11d, ITGAE, CD103, ITGAL, CD11a, LFA-1, ITGAM, CD11b, ITGAX, CD11c, ITGB1, CD29, ITGB2, CD18, LFA-1, ITGB7, NKG2D, NKG2C, NKD2C SLP76, TNFR2, TRANCE/RANKL, DNAM1 (CD226), SLAMF4 (CD244, 2B4), CD84, CD96 (Tactile), CEACAM1, CRTAM, Ly9 (CD229), CD160 (BY55), PSGL1, CD100 (SEMA4D), CD69, SLAMF6 (NTB-A, Ly108), SLAM (SLAMF1, CD150, IPO-3), BLAME (SLAMF8), SELPLG (CD162), LTBR, LAT, CD270 (HVEM), GADS, SLP-76, PAG/Cbp, CD19a, a ligand that specifically binds with CD83, DAP 10, TRIM, ZAP70, Killer immunoglobulin receptors (KIRs) such as KIR2DL1, KIR2DL2/L3, KIR2DL4, KIR2DL5A, KIR2DL5B, KIR2DS1, KIR2DS2, KIR2DS3, KIR2DS4, KIR2DS5, KIR3DL1/S1, KIR3DL2, KIR3DL3, and KIR2DP1; lectin related NK cell receptors such as Ly49, Ly49A, and Ly49C.

[0143] In some embodiments, the intracellular signaling domain of the present invention may contain signaling domains derived from JAK-STAT. In other embodiments, the intracellular signaling domain of the present invention may contain signaling domains derived from DAP-12 (Death associated protein 12) (Topfer et al., Immunol., 2015, 194: 3201-3212; and Wang et al., Cancer Immunol., 2015, 3: 815-826). DAP-12 is a key signal transduction receptor in NK cells. The activating signals mediated by DAP-12 play important roles in triggering NK cell cytotoxicity responses toward certain tumor cells and virally infected cells. The cytoplasmic domain of DAP12 contains an Immunoreceptor Tyrosine-based Activation Motif (ITAM). Accordingly, a CAR containing a DAP12-derived signaling domain may be used for adoptive transfer of NK cells.

[0144] In some embodiments, T cells engineered with two or more CARs incorporating distinct co-stimulatory domains and regulated by distinct DD may be used to provide kinetic control of downstream signaling.

[0145] In some embodiments, intracellular signaling domain of the CAR may be a CD3 zeta signaling domain (SEQ ID NO. 299), encoded by any of the nucleotide sequence of SEQ ID NO. 501-505, and 786. In some embodiments, the intracellular signaling domain of the CAR may be a 4-1BB intracellular signaling domain (SEQ ID NO. 233), encoded by any of the nucleotide sequence of SEQ ID NO. 506-510, and 785.

[0146] In some embodiments, the GITR co-stimulatory domains may be useful in the CAR described herein. In some embodiments, the GITR domains may be capable of inducing T cell effector function and activating T cells. In some aspects, GITR domains described herein may be able to suppress inhibitory T regulatory cells that block immune response. In some embodiments, GITR intracellular domain containing CAR T cells can decrease the production of cytokines, which may reduce the cytokine release syndrome.

[0147] In some embodiments, the intracellular signaling domain of the present invention may be an intracellular domain comprising the amino acid and nucleotide sequences provided in Table 3.

TABLE 3
Additional intracellular signaling
and co-stimulatory domains

| | | Amino | Nucleic |
|---|---|---|---|
| | | acid | acid |
| | | SEQ | SEQ |
| | | ID | ID |
| Domain | Sequence | NO | NO. |
| 4-1 BB | KRGRKKLLYIFKQPFMRPV | 1171 | 1177; |
| intracellular | QTTQEEDGCSCRFPEEEE | | 1178 |
| domain | GGCEL | | |
| CD27 | QRRKYRSNKGESPVEPAEP | 1172 | 1179 |
| | CRYSCPREEEGSTIPIQED | | |
| | YRKPEPACSP | | |
| CD3 Zeta | RVKFSRSADAPAYKQGQNQ | 1173 | 1180- |
| | LYNELNLGRREEYDVLDKR | | 1181 |
| | RGRDPEMGGKPRRKNPQEG | | |
| | LYNELQKDKMAEAYSEIGM | | |
| | KGERRRGKGHDGLYQGLST | | |
| | ATKDTYDALHMQALPPR | | |
| CD3 Zeta | RVKFSRSADAPAYQQGQNQ | 1174 | 1182 |
| | LYNELNLGRREEYDVLDKR | | |
| | RGRDPEMGGKPRRKNPQEG | | |
| | LYNELQKDKMAE | | |
| | AYSEIGMKGERRRGKGHDG | | |
| | LYQGLSTATKDTYDALHMQ | | |
| | ALPPR | | |
| ICOS | TKKKYSSSVHDPNGEYMFM | 1175 | 1183 |
| intracellular | RAVNTAKKSRLTDVTL | | |
| domain (AA) | | | |
| CD28 | RSKRSRLLHSDYMNMTPRR | 1176 | 1184 |
| intracellular | PGPTRKHYQPYAPPRDF | | |
| domain (AA) | AAYRS | | |

### Transmembrane Domains

[0148] In some embodiments, the CAR of the present invention may comprise a transmembrane domain. As used herein, the term “Transmembrane domain (TM)” refers broadly to an amino acid sequence of about 15 residues in length which spans the plasma membrane. More preferably, a transmembrane domain includes at least 20, 21, 22, 23, 24, 25, 26, 27, 28, 29, 30, 31, 32, 33, 34, 35, 36, 37, 38, 39, 40, 41, 42, 43, 44, or 45 amino acid residues and spans the plasma membrane. In some embodiments, the transmembrane domain of the present invention may be derived either from a natural or from a synthetic source. The transmembrane domain of a CAR may be derived from any naturally membrane-bound or transmembrane protein. For example, the transmembrane region may be derived from (i.e. comprise at least the transmembrane region(s) of) the alpha, beta or zeta chain of the T-cell receptor, CD3 epsilon, CD4, CD5, CD8, CD8α, CD9, CD16, CD22, CD33, CD28, CD37, CD45, CD64, CD80, CD86, CD134, CD137, CD152, or CD154.

[0149] Alternatively, the transmembrane domain of the present invention may be synthetic. In some aspects, the synthetic sequence may comprise predominantly hydrophobic residues such as leucine and valine.

[0150] In some embodiments, the transmembrane domain of the present invention may be selected from the group consisting of a CD8α transmembrane domain, a CD4 transmembrane domain, a CD 28 transmembrane domain, a CTLA-4 transmembrane domain, a PD-1 transmembrane domain, and a human Ig_{G4} Fc region. As non-limiting examples, the transmembrane domain may be a CTLA-4 transmembrane domain comprising the amino acid sequences of SEQ ID NOs. 1-5 of International Patent Publication NO. WO2014/100385; and a PD-1 transmembrane domain comprising the amino acid sequences of SEQ ID NOs. 6-8 of International Patent Publication NO. WO2014100385; the contents of each of which are incorporated herein by reference in their entirety.

[0151] In some embodiments, the CAR of the present invention may comprise an optional hinge region (also called spacer). A hinge sequence is a short sequence of amino acids that facilitates flexibility of the extracellular targeting domain that moves the target binding domain away from the effector cell surface to enable proper cell/cell contact, target binding and effector cell activation (Patel et al., Gene Therapy, 1999; 6: 412-419). The hinge sequence may be positioned between the targeting moiety and the transmembrane domain. The hinge sequence can be any suitable sequence derived or obtained from any suitable molecule. The hinge sequence may be derived from all or part of an immunoglobulin (e.g., IgG1, IgG2, IgG3, IgG4) hinge region, i.e., the sequence that falls between the CHI and CH2 domains of an immunoglobulin, e.g., an IgG4 Fc hinge, the extracellular regions of type 1 membrane proteins such as CD8αCD4, CD28 and CD7, which may be a wild type sequence or a derivative. Some hinge regions include an immunoglobulin CH3 domain or both a CH3 domain and a CH2 domain. In certain embodiments, the hinge region may be modified from an IgG1, IgG2, IgG3, or IgG4 that includes one or more amino acid residues, for example, 1, 2, 3, 4 or 5 residues, substituted with an amino acid residue different from that present in an unmodified hinge.

[0152] In some embodiments, the transmembrane domain may be a CD8 transmembrane domain, comprising the amino acid sequence of SEQ ID NO. 1185, encoded by the nucleotide sequence of SEQ ID NO. 1186-1187. In one embodiment, the transmembrane domain may be a ICOS transmembrane domain, comprising the amino acid sequence of SEQ ID NO. 1188, encoded by the nucleotide sequence of SEQ ID NO. 1189.

[0153] In some embodiments, the hinge region may be a CD8 hinge region, comprising the amino acid sequence of SEQ ID NO. 1190, encoded by the nucleotide sequence of SEQ ID NO. 1191. In some embodiments, the hinge region may be an Ig4 hinge region, comprising the amino acid sequence of SEQ ID NO. 1192, encoded by the nucleotide sequence of SEQ ID NO. 1193 or an IgD hinge, comprising the amino acid sequence of SEQ ID NO. 1194, encoded by the nucleotide sequence of SEQ ID NO. 1195.

[0154] In some embodiments, the CAR of the present invention may comprise one or more linkers between any of the domains of the CAR. The linker may be between 1-30 amino acids long. In this regard, the linker may be 1, 2, 3, 4, 5, 6, 7, 8, 9, 10, 11, 12, 13, 14, 15, 16, 17, 18, 19, 20, 21, 22, 23, 24, 25, 26, 27, 28, 29 or 30 amino acids in length. In other embodiments, the linker may be flexible.

[0155] In some embodiments, the components including the targeting moiety, transmembrane domain and intracellular signaling domains of the present invention may be constructed in a single fusion polypeptide. The fusion polypeptide may be the payload of an effector module of the invention. In some embodiments, more than one CAR fusion polypeptides may be included in an effector module, for example, two, three or more CARs may be included in the effector module under the control of a single SRE (e.g., a DD).

[0156] In one embodiment of the present invention, the payload of the invention is a CD19 specific CAR targeting different B cell. In the context of the invention, an effector module may comprise a hDHFR DD, ecDHFR DD, or FKBP DD operably linked to a CD19 CAR fusion construct. In some instances, the promoter utilized to drive the expression of the effector module in the vector may be a CMV promoter or an EF1a. The efficiency of the promoter in driving the expression of the same construct may be compared. For example, two constructs that differ only by their promoter, CMV (in OT-001010 OT-CD19-001 or OT-CD19N-001) or EF1a promoter (in OT-001399 (OT-CD19-055)) may be compared. The amino acid sequences of CD19 CAR constructs and its components are presented in Table 4, and Table 5. In some embodiments, the constructs described herein may comprise two or more payloads and are herein referred to as “tandem constructs”. For example, the CD19 CAR IL12 tandem construct may comprise the both the CD19 CAR and the IL12 payloads operably linked to each. One or more payloads in a tandem construct may further be appended to an SRE to generate the biocircuits of the invention. The amino acid sequences of CD19 and IL15 tandem and CD19 and IL12 tandem expression constructs are also presented in Table 5.

[0157] In some embodiments, the CD19 constructs of the invention may be placed under the transcriptional control of the CMV promoter (SEQ ID NO. 556, 1100), an EF1a promoter (SEQ ID NO. 557, 708, 1099, 1103) or a PGK promoter (SEQ ID NO. 558, 1101, 1104).

[0158] The amino acid sequences in Table 4 and/or Table 5 may comprise a stop codon which is denoted in the table with a “*” at the end of the amino acid sequence. In some embodiments, the leader sequence derived from human CD8a may comprise amino acids 2-21 of the wild type human CD8a sequence. This may be referred to as an M1del mutation. In the tables below, “WT” means wild-type.

TABLE 4
Sequences of components of CD19 CARs

| | | Amino | |
|---|---|---|---|
| | | Acid | Nucleic |
| | | SEQ | Acid SEQ |
| Description | Amino Acid Sequence | ID NO | ID NO |
| CD19 scFv | DIQMTQTTSSLSASLGDRVTISCRASQDISKYLNWY | 465 | 467, 490- |
| | QQKPDGTVKLLIYHTSRLHSGVPSRFSGSGSGTDYS | | 494 |
| | LTISNLEQEDIATYFCQQGNTLPYTFGGGTKLEITG | | |
| | GGGSGGGGSGGGGSEVKLQESGPGLVAPSQSLSVT | | |
| | CTVSGVSLPDYGVSWIRQPPRKGLEWLGVIWGSET | | |
| | TYYNSALKSRLTIIKDNSKSQVFLKMNSLQTDDTAI | | |
| | YYCAKHYYYGGSYAMDYWGQGTSVTVSS | | |
| CD8α hinge TM | TTTPAPRPPTPAPTIASQPLSLRPEACRPAAGGAVH | 466 | 468, 495, |
| | TRGLDFACDIYIWAPLAGTCGVLLLSLVITLYC | | 782-784 |
| CD8α hinge | TTTPAPRPPTPAPTIASQPLSLRPEACRPAAGGAVH | 400 | 496-500 |
| | TRGLDFACD | | |
| CD3 zeta signaling | RVKFSRSADAPAYKQGQNQLYNELNLGRREEYDV | 299 | 501-505, |
| domain | LDKRRGRDPEMGGKPRRKNPQEGLYNELQKDKM | | 786 |
| | AEAYSEIGMKGERRRGKGHDGLYQGLSTATKDTY | | |
| | DALHMQALPPR | | |
| 4-1BB (41BB) | KRGRKKLLYIFKQPFMRPVQTTQEEDGCSCRFPEE | 233 | 506-510, |
| intracellular signaling | EEGGCEL | | 785 |
| domain | | | |
| CD8a Transmembrane | IYIWAPLAGTCGVLLLSLVITLYC | 369 | 790, 792 |
| domain | | | |
| CD8α leader | MALPVTALLLPLALLLHAARP | 469 | 511-515 |
| p40 signal sequence | MCHQQLVISWFSLVFLASPLVA | 559 | 567-575 |
| IgE leader | MDWTWILFLVAAATRVHS | 630 | 730 |
| p40 (WT) | MCHQQLVISWFSLVFLASPLVAIWELKKDVYVVEL | 1091 | 11094 |
| | DWYPDAPGEMVVLTCDTPEEDGITWTLDQSSEVL | | |
| | GSGKTLTIQVKEFGDAGQYTCHKGGEVLSHSLLLL | | |
| | HKKEDGIWSTDILKDQKEPKNKTFLRCEAKNYSGR | | |
| | FTCWWLTTISTDLTFSVKSSRGSSDPQGVTCGAAT | | |
| | LSAERVRGDNKEYEYSVECQEDSACPAAEESLPIE | | |
| | VMVDAVHKLKYENYTSSFFIRDIIKPDPPKNLQLKP | | |
| | LKNSRQVEVSWEYPDTWSTPHSYFSLTFCVQVQG | | |
| | KSKREKKDRVFTDKTSATVICRKNASISVRAQDRY | | |
| | YSSSWSEWASVPCS | | |
| p40 (23-328 of WT) | IWELKKDVYVVELDWYPDAPGEMVVLTCDTPEED | 563 | 472-474, |
| | GITWTLDQSSEVLGSGKTLTIQVKEFGDAGQYTCH | | 583-592 |
| | KGGEVLSHSLLLLHKKEDGIWSTDILKDQKEPKNK | | |
| | TFLRCEAKNYSGRFTCWWLTTISTDLTFSVKSSRGS | | |
| | SDPQGVTCGAATLSAERVRGDNKEYEYSVECQED | | |
| | SACPAAEESLPIEVMVDAVHKLKYENYTSSFFIRDII | | |
| | KPDPPKNLQLKPLKNSRQVEVSWEYPDTWSTPHS | | |
| | YFSLTFCVQVQGKSKREKKDRVFTDKTSATVICRK | | |
| | NASISVRAQDRYYSSSWSEWASVPCS | | |
| p35 (WT) | MWPPGSASQPPPSPAAATGLHPAARPVSLQCRLSM | 1093 | 1094 |
| | CPARSLLLVATLVLLDHLSLARNLPVATPDPGMFP | | |
| | CLHHSQNLLRAVSNMLQKARQTLEFYPCTSEEIDH | | |
| | EDITKDKTSTVEACLPLELTKNESCLNSRETSFITNG | | |
| | SCLASRKTSFMMALCLSSIYEDLKMYQVEFKTMN | | |
| | AKLLMDPKRQIFLDQNMLAVIDELMQALNFNSET | | |
| | VPQKSSLEEPDFYKTKIKLCILLHAFRIRAVTIDRV | | |
| | MSYLNAS | | |
| p35 (57-253 of WT) | RNLPVATPDPGMFPCLHHSQNLLRAVSNMLQKAR | 564 | 593-602, |
| | QTLEFYPCTSEEIDHEDITKDKTSTVEACLPLELTK | | 811 |
| | NESCLNSRETSFITNGSCLASRKTSFMMALCLSSIY | | |
| | EDLKMYQVEFKTMNAKLLMDPKRQIFLDQNMLA | | |
| | VIDELMQALNFNSETVPQKSSLEEPDFYKTKIKLCI | | |
| | LLHAFRIRAVTIDRVMSYLNAS | | |
| IL 15 (WT) | MRISKPHLRSISIQCYLCLLLNSHFLTEAGIHVFILG | 1095 | 1096 |
| | CFSAGLPKTEANWVNVISDLKKIEDLIQSMHIDATL | | |
| | YTESDVHPSCKVTAMKCFLLELQVISLESGDASIHD | | |
| | TVENLIILANNSLSSNGNVTESGCKECEELEEKNIKE | | |
| | FLQSFVHIVQMFINTS | | |
| IL15 (49-162 of WT) | NWVNVISDLKKIEDLIQSMHIDATLYTESDVHPSCK | 616 | 623-626, |
| | VTAMKCFLLELQVISLESGDASIHDTVENLIILANN | | 801 |
| | SLSSNGNVTESGCKECEELEEKNIKEFLQSFVHIVQ | | |
| | MFINTS | | |
| IL15Ra (WT; Uniprot | MAPRRARGCRTLGLPALLLLLLLRPPATRGITCPPP | 1097 | 1098 |
| ID: Q13261.1) | MSVEHADIWVKSYSLYSRERYICNSGFKRKAGTSS | | |
| | LTECVLNKATNVAHWTTPSLKCIRDPALVHQRPAP | | |
| | PSTVTTAGVTPQPESLSPSGKEPAASSPSSNNTAAT | | |
| | TAAIVPGSQLMPSKSPSTGTTEISSHESSHGTPSQTT | | |
| | AKNWELTASASHQPPGVYPQGHSDTTVAISTSTVL | | |
| | LCGLSAVSLLACYLKSRQTPPLASVEMEAMEALPV | | |
| | TWGTSSRDEDLENCSHHL | | |
| IL 15Ra (31-267 of | ITCPPPMSVEHADIWVKSYSLYSRERYICNSGFKRK | 632 | 639-640, |
| WT) | AGTSSLTECVLNKATNVAHWTTPSLKCIRDPALVH | | 803 |
| | QRPAPPSTVTTAGVTPQPESLSPSGKEPAASSPSSN | | |
| | NTAATTAAIVPGSQLMPSKSPSTGTTEISSHESSHGT | | |
| | PSQTTAKNWELTASASHQPPGVYPQGHSDTTVAIS | | |
| | TSTVLLCGLSAVSLLACYLKSRQTPPLASVEMEAM | | |
| | EALPVTWGTSSRDEDLENCSHHL | | |
| mCherry | MSKGEEDNMAIIKEFMRFKVHMEGSVNGHEFEIEG | 857 | 858 |
| | EGEGRPYEGTQTAKLKVTKGGPLPFAWDILSPQFM | | |
| | YGSKAYVKHPADIPDYLKLSFPEGFKWERVMNFE | | |
| | DGGVVTVTQDSSLQDGEFIYKVKLRGTNFPSDGPV | | |
| | MQKKTMGWEASSERMYPEDGALKGEIKQRLKLK | | |
| | DGGHYDAEVKTTYKAKKPVQLPGAYNVNIKLDIT | | |
| | SHNEDYTIVEQYERAEGRHSTGGMDELYK | | |
| mCherry (MIL) | LSKGEEDNMAIIKEFMRFKVHMEGSVNGHEFEIEG | 828 | 829 |
| | EGEGRPYEGTQTAKLKVTKGGPLPFAWDILSPQFM | | |
| | YGSKAYVKHPADIPDYLKLSFPEGFKWERVMNFE | | |
| | DGGVVTVTQDSSLQDGEFIYKVKLRGTNFPSDGPV | | |
| | MQKKTMGWEASSERMYPEDGALKGEIKQRLKLK | | |
| | DGGHYDAEVKTTYKAKKPVQLPGAYNVNIKLDIT | | |
| | SHNEDYTIVEQYERAEGRHSTGGMDELYK | | |
| IRES | — | — | 799 |
| Linker (GGSGG) | GGSGG | 470 | 516-520 |
| Linker (SG) | SG | — | AGTGGA |
| Linker ((G4S)3) | GGGGSGGGGSGGGGS | 560 | 710-715 |
| Linker (GGSG) | GGSG | 649 | 650; 1041; |
| | | | 1108 |
| CSF2R Signal | MLLLVTSLLLCELPHPAFLLIP | 830 | 831 |
| Sequence (leader) | | | |
| Linker | SGGGSGGGGSGGGGSGGGGSGGGSLQ | 631 | 638,716- |
| (SG3(SG4)3SG3SLQ) | | | 720, 802 |
| BamHI (GS) | GS | — | GGATCA, |
| | | | GGATCC, |
| | | | GGATCA |
| Linker (GSG) | GSG | — | GGATCT |
| (BamHl-Gly) | | | GGA |
| Linker (GSSG) | GSSG | 1109 | 1110 |
| Modified Furin | ESRRVRRNKRSK | 471 | 521-253 |
| Spacer | — | — | 800 |
| Spacer | — | — | 1042 |
| HA Tag | YPYDVPDYA | 823 | 824-826 |
| P2A cleavage site | ATNFSLLKQAGDVEENPGP | 576 | 1043 |
| P2A cleavage site | GATNFSLLKQAGDVEENPGP | 725 | 726 |
| FKBP (M1del, F37V, | GVQVETISPGDGRTFPKRGQTCVVHYTGMLEDGK | 6 | 524-526, |
| L107P) | KVDSSRDRNKPFKFMLGKQEVIRGWEEGVAQMSV | | 787, 789 |
| | GQRAKLTISPDYAYGATGHPGIIPPHATLVFDVELL | | |
| | KPE | | |
| FKBP (M1del, E32G, | GVQVETISPGDGRTFPKRGQTCVVHYTGMLGDGK | 7 | 528-531, |
| F37V, R72G, K106E) | KVDSSRDRNKPFKFMLGKQEVIRGWEEGVAQMSV | | 794, 812, |
| | GQGAKLTISPDYAYGATGHPGIIPPHATLVFDVELL | | 827 |
| | ELE | | |
| ecDHFR (M1del, | ISLIAALAVDYVIGMENAMPWNLPADLAWFKRNT | 4 | 532, 603, |
| R12Y, Y100I) | LNKPVIMGRHTWESIGRPLPGRKNIILSSQPGTODR | | 641, 527, |
| | VTWVKSVDEAIAACGDVPEIMVIGGGRVIEQFLPK | | 788, 791, |
| | AQKLYLTHIDAEVEGDTHFPDYEPDDWESVFSEFH | | 1111 |
| | DADAQNSHSYCFEILERR | | |
| ecDHFR (M1del, | ISLIAALAVDHVIGMENAMPWNLPADLAWFKRNT | 5 | 627, 642, |
| R12H, E129K) | LNKPVIMGRHTWESIGRPLPGRKNIILSSQPGTODR | | 793 |
| | VTWVKSVDEAIAACGDVPEIMVIGGGRVYEQFLPK | | |
| | AQKLYLTHIDAEVEGDTHFPDYKPDDWESVFSEFH | | |
| | DADAQNSHSYCFEILERR | | |
| hDHFR (M1del, | VGSLNCIVAVSQNMGIGKNGDLPWPPLRNEFRYFQ | 696 | 534, 795, |
| Y122I) | RMTTTSSVEGKQNLVIMGKKTWFSIPEKNRPLKGR | | 1112 |
| | INLVLSRELKEPPQGAHFLSRSLDDALKLTEQPELA | | |
| | NKVDMVWIVGGSSVIKEAMNHPGHLKLFVTRIMQ | | |
| | DFESDTFFPEIDLEKYKLLPEYPGVLSDVQEEKGIK | | |
| | YKFEVYEKND | | |
| hDHFR (M1del, | VGSLNCIVAVSQNMGIGKNGDLPWPPLRNEFRYFQ | 691 | 536, 773, |
| Y122I, A125F) | RMTTTSSVEGKQNLVIMGKKTWFSIPEKNRPLKGR | | 774, 796 |
| | INLVLSRELKEPPQGAHFLSRSLDDALKLTEQPELA | | |
| | NKVDMVWIVGGSSVIKEFMNHPGHLKLFVTRIMQ | | |
| | DFESDTFFPEIDLEKYKLLPEYPGVLSDVQEEKGIK | | |
| | YKFEVYEKND | | |
| hDHFR (M1del, | VGSLNCIVAVSQNMGIGKNGDLPWPPLRNEFRYFK | 781 | 538, 797 |
| Q36K, Y122I) | RMTTTSSVEGKQNLVIMGKKTWFSIPEKNRPLKGR | | |
| | INLVLSRELKEPPQGAHFLSRSLDDALKLTEQPELA | | |
| | NKVDMVWIVGGSSVIKEAMNHPGHLKLFVTRIMQ | | |
| | DFESDTFFPEIDLEKYKLLPEYPGVLSDVQEEKGIK | | |
| | YKFEVYEKND | | |
| hDHFR (M1del, | VGSLNCIVAVSQNMGIGKNGDLPWPPLRNEFRYFF | 692 | 540, 775, |
| Q36F, N65F, Y122I) | RMTTTSSVEGKQNLVIMGKKTWFSIPEKFRPLKGRI | | 776, 798 |
| | NLVLSRELKEPPQGAHFLSRSLDDALKLTEQPELA | | |
| | NKVDMVWIVGGSSVIKEAMNHPGHLKLFVTRIMQ | | |
| | DFESDTFFPEIDLEKYKLLPEYPGVLSDVQEEKGIK | | |
| | YKFEVYEKND | | |
| hDHFR (M1del, I17V, | VGSLNCIVAVSQNMGVGKNGDLPWPPLRNEFRYF | 688 | 1113 |
| Y122I) | QRMTTTSSVEGKQNLVIMGKKTWFSIPEKNRPLKG | | |
| | RINLVLSRELKEPPQGAHFLSRSLDDALKLTEQPEL | | |
| | ANKVDMVWIVGGSSVIKEAMNHPGHLKLFVTRIM | | |
| | QDFESDTFFPEIDLEKYKLLPEYPGVLSDVQEEKGI | | |
| | KYKFEVYEKND | | |
| hDHFR (M1del, | VGSLNCIVAVSQNMGAGKNGDLPWPPLRNEFRYF | 1114 | 1115 |
| I17A) | QRMTTTSSVEGKQNLVIMGKKTWFSIPEKNRPLKG | | |
| | RINLVLSRELKEPPQGAHFLSRSLDDALKLTEQPEL | | |
| | ANKVDMVWIVGGSSVYKEAMNHPGHLKLFVTRI | | |
| | MQDFESDTFFPEIDLEKYKLLPEYPGVLSDVQEEK | | |
| | GIKYKFEVYEKND | | |
| hDHFR (M1del, I17A, | VGSLNCIVAVSQNMGAGKNGDLPWPPLRNEFRYF | 1116 | 1117 |
| Y122I) | QRMTTTSSVEGKQNLVIMGKKTWFSIPEKNRPLKG | | |
| | RINLVLSRELKEPPQGAHFLSRSLDDALKLTEQPEL | | |
| | ANKVDMVWIVGGSSVIKEAMNHPGHLKLFVTRIM | | |
| | QDFESDTFFPEIDLEKYKLLPEYPGVLSDVQEEKGI | | |
| | KYKFEVYEKND | | |

TABLE 5
Sequences of CD19 CARs

| | | | Amino | Nucleic |
|---|---|---|---|---|
| | Sequence | | Acid | Acid |
| Construct | Descrip- | | SEQ | SEQ ID |
| Description | tion | Amino Acid Sequence | ID NO | NO |
| OT-001405 | Full | — | — | 818 |
| (Full | Construct | | | |
| Construct; | Encoded | MALPVTALLLPLALLLHAARPDIQMTQTTS | 1104 | 1106 |
| CD8a leader; | Protein 1 | SLSASLGDRVTISCRASQDISKYLNWYQQKP | | |
| CD19 scFv; | | DGTVKLLIYHTSRLHSGVPSRFSGSGSGTDY | | |
| CD8a Hinge | | SLTISNLEQEDIATYFCQQGNTLPYTFGGGT | | |
| and | | KLEITGGGGSGGGGSGGGGSEVKLQESGPG | | |
| Transmembrane | | LVAPSQSLSVTCTVSGVSLPDYGVSWIRQPP | | |
| Domain; 4- | | RKGLEWLGVIWGSETTYYNSALKSRLTIIKD | | |
| 1BB | | NSKSQVFLKMNSLQTDDTAIYYCAKHYYY | | |
| intracellular | | GGSYAMDYWGQGTSVTVSSTTTPAPRPPTP | | |
| domain; CD3 | | APTIASQPLSLRPEACRPAAGGAVHTRGLDF | | |
| zeta signaling | | ACDIYIWAPLAGTCGVLLLSLVITLYCKRGR | | |
| domain; stop; | | KKLLYIFKQPFMRPVQTTQEEDGCSCRFPEE | | |
| BamHI; IRES; | | EEGGCELRVKFSRSADAPAYKQGQNQLYN | | |
| spacer; p40 | | ELNLGRREEYDVLDKRRGRDPEMGGKPRR | | |
| signal | | KNPQEGLYNELQKDKMAEAYSEIGMKGER | | |
| sequence; p40 | | RRGKGHDGLYQGLSTATKDTYDALHMQAL | | |
| (23-328 of | | PPR* | | |
| WT); Linker | Encoded | MCHQQLVISWFSLVFLASPLVAIWELKKDV | 1105 | 1107 |
| ((G4S)3); p35 | Protein 2 | YVVELDWYPDAPGEMVVLTCDTPEEDGIT | | |
| (57-253 of | | WTLDQSSEVLGSGKTLTIQVKEFGDAGQYT | | |
| WT); Linker | | CHKGGEVLSHSLLLLHKKEDGIWSTDILKD | | |
| (GGSG); | | QKEPKNKTFLRCEAKNYSGRFTCWWLTTIS | | |
| FKBP (M1del, | | TDLTFSVKSSRGSSDPQGVTCGAATLSAER | | |
| E32G, F37V, | | VRGDNKEYEYSVECQEDSACPAAEESLPIE | | |
| R72G, | | VMVDAVHKLKYENYTSSFFIRDIIKPDPPKN | | |
| K106E); stop) | | LQLKPLKNSRQVEVSWEYPDTWSTPHSYFS | | |
| (Encoded | | LTFCVQVQGKSKREKKDRVFTDKTSATVIC | | |
| Protein 1: | | RKNASISVRAQDRYYSSSWSEWASVPCSGG | | |
| CD8a leader; | | GGSGGGGSGGGGSRNLPVATPDPGMFPCLH | | |
| CD19 scFv; | | HSQNLLRAVSNMLQKARQTLEFYPCTSEEI | | |
| CD8a Hinge | | DHEDITKDKTSTVEACLPLELTKNESCLNSR | | |
| and | | ETSFITNGSCLASRKTSFMMALCLSSIYEDL | | |
| Transmembrane | | KMYQVEFKTMNAKLLMDPKRQIFLDQNML | | |
| Domain; 4- | | AVTDELMQALNFNSETVPQKSSLEEPDFYKT | | |
| 1BB | | KIKLCILLHAFRIRAVTIDRVMSYLNASGGS | | |
| intracellular | | GGVQVETISPGDGRTFPKRGQTCVVHYTGM | | |
| domain; CD3 | | LGDGKKVDSSRDRNKPFKFMLGKQEVIRG | | |
| zeta signaling | | WEEGVAQMSVGQGAKLTISPDYAYGATGH | | |
| domain; stop) | | PGIIPPHATLVFDVELLELE* | | |
| (Encoded | | | | |
| Protein 2: p40 | | | | |
| signal | | | | |
| sequence; p40 | | | | |
| (23-328 of | | | | |
| WT); Linker | | | | |
| ((G4S)3); p35 | | | | |
| (57-253 of | | | | |
| WT); Linker | | | | |
| (GGSG); | | | | |
| FKBP (M1del, | | | | |
| E32G, F37V, | | | | |
| R72G, | | | | |
| K106E); stop) | | | | |
| (OT-CD19- | | | | |
| 039) | | | | |
| OT-001406 | Full | — | — | 819 |
| (Full | Construct | | | |
| Construct: | Encoded | MALPVTALLLPLALLLHAARPDIQMTQTTS | 1104 | 541 |
| CD8a leader; | Protein 1 | SLSASLGDRVTISCRASQDISKYLNWYQQKP | | |
| CD19 scFv; | | DGTVKLLIYHTSRLHSGVPSRFSGSGSGTDY | | |
| CD8a Hinge | | SLTISNLEQEDIATYFCQQGNTLPYTFGGGT | | |
| and | | KLEITGGGGSGGGGSGGGGSEVKLQESGPG | | |
| Transmembrane | | LVAPSQSLSVTCTVSGVSLPDYGVSWIRQPP | | |
| Domain; 4- | | RKGLEWLGVIWGSETTYYNSALKSRLTIIKD | | |
| 1BB | | NSKSQVFLKMNSLQTDDTAIYYCAKHYYY | | |
| intracellular | | GGSYAMDYWGQGTSVTVSSTTTPAPRPPTP | | |
| domain; CD3 | | APTIASQPLSLRPEACRPAAGGAVHTRGLDF | | |
| zeta signaling | | ACDIYIWAPLAGTCGVLLLSLVITLYCKRGR | | |
| domain; stop; | | KKLLYIFKQPFMRPVQTTQEEDGCSCRFPEE | | |
| BamH1 | | EEGGCELRVKFSRSADAPAYKQGQNQLYN | | |
| (GGATCC); | | ELNLGRREEYDVLDKRRGRDPEMGGKPRR | | |
| IRES; spacer; | | KNPQEGLYNELQKDKMAEAYSEIGMKGER | | |
| p40 signal | | RRGKGHDGLYQGLSTATKDTYDALHMQAL | | |
| sequence; p40 | | PPR* | | |
| (23-328 of | Encoded | MCHQQLVISWFSLVFLASPLVAIWELKKDV | 566 | 610 |
| WT); Linker | Protein 2 | YVVELDWYPDAPGEMVVLTCDTPEEDGIT | | |
| ((G4S)3); p35 | | WTLDQSSEVLGSGKTLTIQVKEFGDAGQYT | | |
| (57-253 of | | CHKGGEVLSHSLLLLHKKEDGIWSTDILKD | | |
| WT); stop) | | QKEPKNKTFLRCEAKNYSGRFTCWWLTTIS | | |
| (Encoded | | TDLTFSVKSSRGSSDPQGVTCGAATLSAER | | |
| Protein 1: | | VRGDNKEYEYSVECQEDSACPAAEESLPIE | | |
| CD8a leader; | | VMVDAVHKLKYENYTSSFFIRDIIKPDPPKN | | |
| CD19 scFv: | | LQLKPLKNSRQVEVSWEYPDTWSTPHSYFS | | |
| CD 8a Hinge | | LTFCVQVQGKSKREKKDRVFTDKTSATVIC | | |
| and | | RKNASISVRAQDRYYSSSWSEWASVPCSGG | | |
| Transmembrane | | GGSGGGGSGGGGSRNLPVATPDPGMFPCLH | | |
| Domain; 4- | | HSQNLLRAVSNMLQKARQTLEFYPCTSEEI | | |
| 1BB | | DHEDITKDKTSTVEACLPLELTKNESCLNSR | | |
| intracellular | | ETSFITNGSCLASRKTSFMMALCLSSIYEDL | | |
| domain; CD3 | | KMYQVEFKTMNAKLLMDPKRQIFLDQNML | | |
| zeta signaling | | AVTDELMQALNFNSETVPQKSSLEEPDFYKT | | |
| domain; stop) | | KIKLCILLHAFRIRAVTIDRVMSYLNAS* | | |
| (Encoded | | | | |
| Protein 2: p40 | | | | |
| signal | | | | |
| sequence; p40 | | | | |
| (23-328 of | | | | |
| WT); Linker | | | | |
| ((G4S)3); p35 | | | | |
| (57-253 of | | | | |
| WT); stop) | | | | |
| (OT-CD19- | | | | |
| 040) | | | | |
| OT-001407 | Full | MALPVTALLLPLALLLHAARPDIQMTQTTS | 810 | 835 |
| (CD8a leader- | Construct | SLSASLGDRVTISCRASQDISKYLNWYQQKP | | |
| CD19 scFV- | | DGTVKLLIYHTSRLHSGVPSRFSGSGSGTDY | | |
| CD8a-Tm- | | SLTISNLEQEDIATYFCQQGNTLPYTFGGGT | | |
| 41BB- | | KLEITGGGGSGGGGSGGGGSEVKLQESGPG | | |
| CD3zeta- | | LVAPSQSLSVTCTVSGVSLPDYGVSWIRQPP | | |
| stop) (OT- | | RKGLEWLGVIWGSETTYYNSALKSRLTIIKD | | |
| CD19-063) | | NSKSQVFLKMNSLQTDDTAIYYCAKHYYY | | |
| | | GGSYAMDYWGQGTSVTVSSTTTPAPRPPTP | | |
| | | APTIASQPLSLRPEACRPAAGGAVHTRGLDF | | |
| | | ACDIYIWAPLAGTCGVLLLSLVITLYCKRGR | | |
| | | KKLLYIFKQPFMRPVQTTQEEDGCSCRFPEE | | |
| | | EEGGCELRVKFSRSADAPAYKQGQNQLYN | | |
| | | ELNLGRREEYDVLDKRRGRDPEMGGKPRR | | |
| | | KNPQEGLYNELQKDKMAEAYSEIGMKGER | | |
| | | RRGKGHDGLYQGLSTATKDTYDALHMQAL | | |
| | | PPR* | | |
| OT-001356 | Full | — | — | 1070 |
| (Full | Construct | | | |
| Construct: | Encoded | MALPVTALLLPLALLLHAARPDIQMTQTTS | 1044 | 1071 |
| CD8a leader; | Protein 1 | SLSASLGDRVTISCRASQDISKYLNWYQQKP | | |
| CD 19 scFv; | | DGTVKLLIYHTSRLHSGVPSRFSGSGSGTDY | | |
| CD8a Hinge | | SLTISNLEQEDIATYFCQQGNTLPYTFGGGT | | |
| and | | KLEITGGGGSGGGGSGGGGSEVKLQESGPG | | |
| Transmembrane | | LVAPSQSLSVTCTVSGVSLPDYGVSWIRQPP | | |
| Domain; 4- | | RKGLEWLGVIWGSETTYYNSALKSRLTIIKD | | |
| 1BB | | NSKSQVFLKMNSLQTDDTAIYYCAKHYYY | | |
| intracellular | | GGSYAMDYWGQGTSVTVSSTTTPAPRPPTP | | |
| domain; CD3 | | APTIASQPLSLRPEACRPAAGGAVHTRGLDF | | |
| zeta signaling | | ACDIYIWAPLAGTCGVLLLSLVITLYCKRGR | | |
| domain; stop; | | KKLLYIFKQPFMRPVQTTQEEDGCSCRFPEE | | |
| spacer; IRES; | | EEGGCELRVKFSRSADAPAYKQGQNQLYN | | |
| spacer; p40 | | ELNLGRREEYDVLDKRRGRDPEMGGKPRR | | |
| signal | | KNPQEGLYNELQKDKMAEAYSEIGMKGER | | |
| sequence; p40 | | RRGKGHDGLYQGLSTATKDTYDALHMQAL | | |
| (23-328 of | | PPR* | | |
| WT); Linker | Encoded | MCHQQLVISWFSLVFLASPLVAIWELKKDV | 1072 | 1073 |
| ((G4S)3); p35 | Protein 2 | YVVELDWYPDAPGEMVVLTCDTPEEDGIT | | |
| (57-253 of | | WTLDQSSEVLGSGKTLTIQVKEFGDAGQYT | | |
| WT); BamHI | | CHKGGEVLSHSLLLLHKKEDGIWSTDILKD | | |
| (GS); stop) | | QKEPKNKTFLRCEAKNYSGRFTCWWLTTIS | | |
| (Encoded | | TDLTFSVKSSRGSSDPQGVTCGAATLSAER | | |
| Protein 1: | | VRGDNKEYEYSVECQEDSACPAAEESLPIE | | |
| CD8a leader; | | VMVDAVHKLKYENYTSSFFIRDIIKPDPPKN | | |
| CD 19 scFv; | | LQLKPLKNSRQVEVSWEYPDTWSTPHSYFS | | |
| CD8a Hinge | | LTFCVQVQGKSKREKKDRVFTDKTSATVIC | | |
| and | | RKNASISVRAQDRYYSSSWSEWASVPCSGG | | |
| Transmembrane | | GGSGGGGSGGGGSRNLPVATPDPGMFPCLH | | |
| Domain; 4- | | HSQNLLRAVSNMLQKARQTLEFYPCTSEEI | | |
| 1BB | | DHEDITKDKTSTVEACLPLELTKNESCLNSR | | |
| intracellular | | ETSFITNGSCLASRKTSFMMALCLSSIYEDL | | |
| domain; CD3 | | KMYQVEFKTMNAKLLMDPKRQIFLDQNML | | |
| zeta signaling | | AVIDELMQALNFNSETVPQKSSLEEPDFYKT | | |
| domain; stop) | | KIKLCILLHAFRIRAVTIDRVMSYLNASGS* | | |
| (Encoded | | | | |
| Protein 2: p40 | | | | |
| signal | | | | |
| sequence; p40 | | | | |
| (23-328 of | | | | |
| WT); Linker | | | | |
| ((G4S)3); p35 | | | | |
| (57-253 of | | | | |
| WT); BamHI | | | | |
| (GS); stop) | | | | |
| (OT-CD19- | | | | |
| IL12-009) | | | | |
| OT-001357 | Full | MALPVTALLLPLALLLHAARPDIQMTQTTS | 1074 | 1075 |
| (CD8a leader; | Construct | SLSASLGDRVTISCRASQDISKYLNWYQQKP | | |
| CD19 scFv; | | DGTVKLLIYHTSRLHSGVPSRFSGSGSGTDY | | |
| CD8a Hinge | | SLTISNLEQEDIATYFCQQGNTLPYTFGGGT | | |
| and | | KLEITGGGGSGGGGSGGGGSEVKLQESGPG | | |
| Transmembrane | | LVAPSQSLSVTCTVSGVSLPDYGVSWIRQPP | | |
| Domain; 4- | | RKGLEWLGVIWGSETTYYNSALKSRLTIIKD | | |
| 1BB | | NSKSQVFLKMNSLQTDDTAIYYCAKHYYY | | |
| intracellular | | GGSYAMDYWGQGTSVTVSSTTTPAPRPPTP | | |
| domain; CD3 | | APTIASQPLSLRPEACRPAAGGAVHTRGLDF | | |
| zeta signaling | | ACDIYIWAPLAGTCGVLLLSLVITLYCKRGR | | |
| domain; | | KKLLYIFKQPFMRPVQTTQEEDGCSCRFPEE | | |
| BamHI (GS); | | EEGGCELRVKFSRSADAPAYKQGQNQLYN | | |
| P2A Cleavage | | ELNLGRREEYDVLDKRRGRDPEMGGKPRR | | |
| Site; p40 | | KNPQEGLYNELQKDKMAEAYSEIGMKGER | | |
| signal | | RRGKGHDGLYQGLSTATKDTYDALHMQAL | | |
| sequence; p40 | | PPRGSATNFSLLKQAGDVEENPGPMCHQQL | | |
| (23-328 of | | VISWFSLVFLASPLVAIWELKKDVYVVELD | | |
| WT); Linker | | WYPDAPGEMVVLTCDTPEEDGITWTLDQSS | | |
| ((G4S)3); p35 | | EVLGSGKTLTIQVKEFGDAGQYTCHKGGEV | | |
| (57-253 of | | LSHSLLLLHKKEDGIWSTDILKDQKEPKNKT | | |
| WT); BamHI | | FLRCEAKNYSGRFTCWWLTTISTDLTFSVKS | | |
| (GS); stop) | | SRGSSDPQGVTCGAATLSAERVRGDNKEYE | | |
| (OT-CD19- | | YSVECQEDSACPAAEESLPIEVMVDAVHKL | | |
| IL12-010) | | KYENYTSSFFIRDIIKPDPPKNLQLKPLKNSR | | |
| | | QVEVSWEYPDTWSTPHSYFSLTFCVQVQGK | | |
| | | SKREKKDRVFTDKTSATVICRKNASISVRAQ | | |
| | | DRYYSSSWSEWASVPCSGGGGSGGGGSGG | | |
| | | GGSRNLPVATPDPGMFPCLHHSQNLLRAVS | | |
| | | NMLQKARQTLEFYPCTSEEIDHEDITKDKTS | | |
| | | TVEACLPLELTKNESCLNSRETSFITNGSCLA | | |
| | | SRKTSFMMALCLSSIYEDLKMYQVEFKTMN | | |
| | | AKLLMDPKRQIFLDQNMLAVIDELMQALNF | | |
| | | NSETVPQKSSLEEPDFYKTKIKLCILLHAFRI | | |
| | | RAVTIDRVMSYLNASGS* | | |
| OT-001386 | Full | — | — | 1079 |
| (Full | Construct | | | |
| Constract: | Encoded | MALPVTALLLPLALLLHAARPDIQMTQTTS | 1044 | 1071 |
| CD8a leader; | Protein 1 | SLSASLGDRVTISCRASQDISKYLNWYQQKP | | |
| CD19 scFv; | | DGTVKLLIYHTSRLHSGVPSRFSGSGSGTDY | | |
| CD8a Hinge | | SLTISNLEQEDIATYFCQQGNTLPYTFGGGT | | |
| and | | KLEITGGGGSGGGGSGGGGSEVKLQESGPG | | |
| Transmembrane | | LVAPSQSLSVTCTVSGVSLPDYGVSWIRQPP | | |
| Domain; 4- | | RKGLEWLGVIWGSETTYYNSALKSRLTIIKD | | |
| 1BB | | NSKSQVFLKMNSLQTDDTAIYYCAKHYYY | | |
| intracellular | | GGSYAMDYWGQGTSVTVSSTTTPAPRPPTP | | |
| domain; CD3 | | APTIASQPLSLRPEACRPAAGGAVHTRGLDF | | |
| zeta signaling | | ACDIYIWAPLAGTCGVLLLSLVITLYCKRGR | | |
| domain; stop; | | KKLLYIFKQPFMRPVQTTQEEDGCSCRFPEE | | |
| spacer; IRES; | | EEGGCELRVKFSRSADAPAYKQGQNQLYN | | |
| spacer; p40 | | ELNLGRREEYDVLDKRRGRDPEMGGKPRR | | |
| signal | | KNPQEGLYNELQKDKMAEAYSEIGMKGER | | |
| sequence; p40 | | RRGKGHDGLYQGLSTATKDTYDALHMQAL | | |
| (23-328 of | | PPR* | | |
| WT); Linker | Encoded | MCHQQLVISWFSLVFLASPLVAIWELKKDV | 1080 | 1081 |
| ((G4S)3); p35 | Protein 2 | YVVELDWYPDAPGEMVVLTCDTPEEDGIT | | |
| (57-253 of | | WTLDQSSEVLGSGKTLTIQVKEFGDAGQYT | | |
| WT); Linker | | CHKGGEVLSHSLLLLHKKEDGIWSTDILKD | | |
| (GGSG); | | QKEPKNKTFLRCEAKNYSGRFTCWWLTTIS | | |
| FKBP (M1del, | | TDLTFSVKSSRGSSDPQGVTCGAATLSAER | | |
| E32G, F37V, | | VRGDNKEYEYSVECQEDSACPAAEESLPIE | | |
| R72G, | | VMVDAVHKLKYENYTSSFFIRDIIKPDPPKN | | |
| K106E); stop) | | LQLKPLKNSRQVEVSWEYPDTWSTPHSYFS | | |
| (Encoded | | LTFCVQVQGKSKREKKDRVFTDKTSATVIC | | |
| Protein 1: | | RKNASISVRAQDRYYSSSWSEWASVPCSGG | | |
| CD8a leader; | | GGSGGGGSGGGGSRNLPVATPDPGMFPCLH | | |
| CD 19 scFv; | | HSQNLLRAVSNMLQKARQTLEFYPCTSEEI | | |
| CD8a Hinge | | DHEDITKDKTSTVEACLPLELTKNESCLNSR | | |
| and | | ETSFITNGSCLASRKTSFMMALCLSSIYEDL | | |
| Transmembrane | | KMYQVEFKTMNAKLLMDPKRQIFLDQNML | | |
| Domain; 4- | | AVTDELMQALNFNSETVPQKSSLEEPDFYKT | | |
| 1BB | | KIKLCILLHAFRIRAVTIDRVMSYLNASGGS | | |
| intracellular | | GGVQVETISPGDGRTFPKRGQTCVVHYTGM | | |
| domain; CD3 | | LGDGKKVDSSRDRNKPFKFMLGKQEVIRG | | |
| zeta signaling | | WEEGVAQMSVGQGAKLTISPDYAYGATGH | | |
| domain; stop) | | PGIIPPHATLVFDVELLELE* | | |
| (Encoded | | | | |
| Protein 2: p40 | | | | |
| signal | | | | |
| sequence; p40 | | | | |
| (23-328 of | | | | |
| WT); Linker | | | | |
| ((G4S)3); p35 | | | | |
| (57-253 of | | | | |
| WT); Linker | | | | |
| (GGSG); | | | | |
| FKBP (M1del, | | | | |
| E32G, F37V. | | | | |
| R72G, | | | | |
| K106E); stop) | | | | |
| (OT-CD19- | | | | |
| 1L12-011) | | | | |
| OT-001387 | Full | MALPVTALLLPLALLLHAARPDIQMTQTTS | 1084 | 1196 |
| (CD8a leader; | Construct | SLSASLGDRVTISCRASQDISKYLNWYQQKP | | |
| CD19 scFv; | | DGTVKLLIYHTSRLHSGVPSRFSGSGSGTDY | | |
| CD8a Hinge | | SLTISNLEQEDIATYFCQQGNTLPYTFGGGT | | |
| and | | KLEITGGGGSGGGGSGGGGSEVKLQESGPG | | |
| Transmembrane | | LVAPSQSLSVTCTVSGVSLPDYGVSWIRQPP | | |
| Domain; 4- | | RKGLEWLGVIWGSETTYYNSALKSRLTIIKD | | |
| 1BB | | NSKSQVFLKMNSLQTDDTAIYYCAKHYYY | | |
| intracellular | | GGSYAMDYWGQGTSVTVSSTTTPAPRPPTP | | |
| domain; CD3 | | APTIASQPLSLRPEACRPAAGGAVHTRGLDF | | |
| zeta signaling | | ACDIYIWAPLAGTCGVLLLSLVITLYCKRGR | | |
| domain; | | KKLLYIFKQPFMRPVQTTQEEDGCSCRFPEE | | |
| BamHI (GS); | | EEGGCELRVKFSRSADAPAYKQGQNQLYN | | |
| P2A Cleavage | | ELNLGRREEYDVLDKRRGRDPEMGGKPRR | | |
| Site; p40 | | KNPQEGLYNELQKDKMAEAYSEIGMKGER | | |
| signal | | RRGKGHDGLYQGLSTATKDTYDALHMQAL | | |
| sequence; p40 | | PPRGSATNFSLLKQAGDVEENPGPMCHQQL | | |
| (23-328 of | | VISWFSLVFLASPLVAIWELKKDVYVVELD | | |
| WT); Linker | | WYPDAPGEMVVLTCDTPEEDGITWTLDQSS | | |
| ((G4S)3); p35 | | EVLGSGKTLTIQVKEFGDAGQYTCHKGGEV | | |
| (57-253 of | | LSHSLLLLHKKEDGIWSTDILKDQKEPKNKT | | |
| WT); Linker | | FLRCEAKNYSGRFTCWWLTTISTDLTFSVKS | | |
| (GGSG) | | SRGSSDPQGVTCGAATLSAERVRGDNKEYE | | |
| FKBP (M1del, | | YSVECQEDSACPAAEESLPIEVMVDAVHKL | | |
| E32G, F37V, | | KYENYTSSFFIRDIIKPDPPKNLQLKPLKNSR | | |
| R72G, | | QVEVSWEYPDTWSTPHSYFSLTFCVQVQGK | | |
| K106E); stop) | | SKREKKDRVFTDKTSATVICRKNASISVRAQ | | |
| (OT-CD19- | | DRYYSSSWSEWASVPCSGGGGSGGGGSGG | | |
| IL12-013) | | GGSRNLPVATPDPGMFPCLHHSQNLLRAVS | | |
| | | NMLQKARQTLEFYPCTSEEIDHEDITKDKTS | | |
| | | TVEACLPLELTKNESCLNSRETSFITNGSCLA | | |
| | | SRKTSFMMALCLSSIYEDLKMYQVEFKTMN | | |
| | | AKLLMDPKRQIFLDQNMLAVIDELMQALNF | | |
| | | NSETVPQKSSLEEPDFYKTKIKLCILLHAFRI | | |
| | | RAVTIDRVMSYLNASGGSGGVQVETISPGD | | |
| | | GRTFPKRGQTCVVHYTGMLGDGKKVDSSR | | |
| | | DRNKPFKFMLGKQEVIRGWEEGVAQMSVG | | |
| | | QGAKLTISPDYAYGATGHPGIIPPHATLVFD | | |
| | | VELLELE* | | |
| OT-001618 | Full | — | — | 1143 |
| CD8 hinge | Construct | | | |
| and | Encoded | MALPVTALLLPLALLLHAARPDIQMTQTTS | 1120 | 1144 |
| transmembrane | Protein 1 | SLSASLGDRVTISCRASQDISKYLNWYQQKP | | |
| domain; 4- | | DGTVKLLIYHTSRLHSGVPSRFSGSGSGTDY | | |
| 1BB | | SLTISNLEQEDIATYFCQQGNTLPYTFGGGT | | |
| intracellular | | KLEITGGGGSGGGGSGGGGSEVKLQESGPG | | |
| signaling | | LVAPSQSLSVTCTVSGVSLPDYGVSWIRQPP | | |
| domain; CD3 | | RKGLEWLGVIWGSETTYYNSALKSRLTIIKD | | |
| zeta signaling | | NSKSQVFLKMNSLQTDDTAIYYCAKHYYY | | |
| domain; stop; | | GGSYAMDYWGQGTSVTVSSTTTPAPRPPTP | | |
| spacer | | APTIASQPLSLRPEACRPAAGGAVHTRGLDF | | |
| (ATCGGGCT | | ACDIYIWAPLAGTCGVLLLSLVITLYCKRGR | | |
| AGC); IRES; | | KKLLYIFKQPFMRPVQTTQEEDGCSCRFPEE | | |
| spacer | | EEGGCELRVKFSRSADAPAYKQGQNQLYN | | |
| (GCTTGCCA | | ELNLGRREEYDVLDKRRGRDPEMGGKPRR | | |
| CAACCCAC | | KNPQEGLYNELQKDKMAEAYSEIGMKGER | | |
| AAGGAGAC | | RRGKGHDGLYQGLSTATKDTYDALHMQAL | | |
| GACCTTCC); | | PPR* | | |
| p40 signal | Encoded | MCHQQLVISWFSLVFLASPLVAIWELKKDV | 1121 | 1143 |
| sequence; | Protein 2 | YVVELDWYPDAPGEMVVLTCDTPEEDGIT | | |
| 1L12B (p40) | | WTLDQSSEVLGSGKTLTIQVKEFGDAGQYT | | |
| (23-328 of | | CHKGGEVLSHSLLLLHKKEDGIWSTDILKD | | |
| WT); Linker | | QKEPKNKTFLRCEAKNYSGRFTCWWLTTIS | | |
| ((G4S)3); | | TDLTFSVKSSRGSSDPQGVTCGAATLSAER | | |
| Flexible G/S | | VRGDNKEYEYSVECQEDSACPAAEESLPIE | | |
| rich linker, | | VMVDAVHKLKYENYTSSFFIRDIIKPDPPKN | | |
| IL12A (p35) | | LQLKPLKNSRQVEVSWEYPDTWSTPHSYFS | | |
| (57-253 of | | LTFCVQVQGKSKREKKDRVFTDKTSATVIC | | |
| WT); | | RKNASISVRAQDRYYSSSWSEWASVPCSGG | | |
| Artificial | | GGSGGGGSGGGGSRNLPVATPDPGMFPCLH | | |
| hnker | | HSQNLLRAVSNMLQKARQTLEFYPCTSEEI | | |
| (GGSGG); | | DHEDITKDKTSTVEACLPLELTKNESCLNSR | | |
| hDHFR | | ETSFITNGSCLASRKTSFMMALCLSSIYEDL | | |
| (M1del, | | KMYQVEFKTMNAKLLMDPKRQIFLDQNML | | |
| Y122I, | | AVIDELMQALNFNSETVPQKSSLEEPDFYKT | | |
| N127Y); stop | | KIKLCILLHAFRIRAVTIDRVMSYLNASGGS | | |
| (OT-CD19- | | GGVGSLNCIVAVSQNMGIGKNGDLPWPPLR | | |
| IL12-019) | | NEFRYFQRMTTTSSVEGKQNLVIMGKKTW | | |
| | | FSIPEKNRPLKGRINLVLSRELKEPPQGAHFL | | |
| | | SRSLDDALKLTEQPELANKVDMVWIVGGSS | | |
| | | VIKEAMYHPGHLKLFVTRIMQDFESDTFFPE | | |
| | | IDLEKYKLLPEYPGVLSDVQEEKGIKYKFEV | | |
| | | YEKND* | | |
| OT-001617 | Full | — | — | 1146 |
| CD8 hinge | Construct | | | |
| and | Encoded | MALPVTALLLPLALLLHAARPDIQMTQTTS | 1122 | 1147 |
| transmembrane | Protein 1 | SLSASLGDRVTISCRASQDISKYLNWYQQKP | | |
| domain; 4- | | DGTVKLLIYHTSRLHSGVPSRFSGSGSGTDY | | |
| 1BB | | SLTISNLEQEDIATYFCQQGNTLPYTFGGGT | | |
| intracellular | | KLEITGGGGSGGGGSGGGGSEVKLQESGPG | | |
| signaling | | LVAPSQSLSVTCTVSGVSLPDYGVSWIRQPP | | |
| domain; CD3 | | RKGLEWLGVIWGSETTYYNSALKSRLTIIKD | | |
| zeta signaling | | NSKSQVFLKMNSLQTDDTAIYYCAKHYYY | | |
| domain; stop; | | GGSYAMDYWGQGTSVTVSSTTTPAPRPPTP | | |
| spacer | | APTIASQPLSLRPEACRPAAGGAVHTRGLDF | | |
| (ATCGGGCT | | ACDIYIWAPLAGTCGVLLLSLVITLYCKRGR | | |
| AGC); IRES; | | KKLLYIFKQPFMRPVQTTQEEDGCSCRFPEE | | |
| Spacer | | EEGGCELRVKFSRSADAPAYKQGQNQLYN | | |
| (gcttgccacaacc | | ELNLGRREEYDVLDKRRGRDPEMGGKPRR | | |
| cacaaggagacga | | KNPQEGLYNELQKDKMAEAYSEIGMKGER | | |
| ccttcc); p40 | | RRGKGHDGLYQGLSTATKDTYDALHMQAL | | |
| signal | | PPR* | | |
| sequence; | Encoded | MCHQQLVISWFSLVFLASPLVAIWELKKDV | 1123 | 1148 |
| IL12B (p40) | Protein 2 | YVVELDWYPDAPGEMVVLTCDTPEEDGIT | | |
| (23-328 of | | WTLDQSSEVLGSGKTLTIQVKEFGDAGQYT | | |
| WT); Linker | | CHKGGEVLSHSLLLLHKKEDGIWSTDILKD | | |
| ((G4S)3); | | QKEPKNKTFLRCEAKNYSGRFTCWWLTTIS | | |
| Flexible G/S | | TDLTFSVKSSRGSSDPQGVTCGAATLSAER | | |
| rich linker; | | VRGDNKEYEYSVECQEDSACPAAEESLPIE | | |
| IL12A (p35) | | VMVDAVHKLKYENYTSSFFIRDIIKPDPPKN | | |
| (57-253 of | | LQLKPLKNSRQVEVSWEYPDTWSTPHSYFS | | |
| WT); | | LTFCVQVQGKSKREKKDRVFTDKTSATVIC | | |
| Artificial | | RKNASISVRAQDRYYSSSWSEWASVPCSGG | | |
| linker | | GGSGGGGSGGGGSRNLPVATPDPGMFPCLH | | |
| (GSSG); | | HSQNLLRAVSNMLQKARQTLEFYPCTSEEI | | |
| ecDHFR | | DHEDITKDKTSTVEACLPLELTKNESCLNSR | | |
| (M1del, | | ETSFITNGSCLASRKTSFMMALCLSSIYEDL | | |
| RUY, | | KMYQVEFKTMNAKLLMDPKRQIFLDQNML | | |
| Y100I); stop) | | AVIDELMQALNFNSETVPQKSSLEEPDFYKT | | |
| (OT-CD19- | | KIKLCILLHAFRIRAVTIDRVMSYLNASGSS | | |
| IL12-026) | | GISLIAALAVDYVIGMENAMPWNLPADLA | | |
| (CD8a leader; | | WFKRNTLNKPVIMGRHTWESIGRPLPGRKN | | |
| CD19 scFv; | | IILSSQPGTDDRVTWVKSVDEAIAACGDVPE | | |
| | | IMVIGGGRVIEQFLPKAQKLYLTHIDAEVEG | | |
| | | DTHFPDYEPDDWESVFSEFHDADAQNSHSY | | |
| | | CFEILERR* | | |
| OT-001622 | Full | MALPVTALLLPLALLLHAARPDIQMTQTTS | 1124 | 1149 |
| (CD8a leader; | Construct | SLSASLGDRVTISCRASQDISKYLNWYQQKP | | |
| CD19 scFv; | | DGTVKLLIYHTSRLHSGVPSRFSGSGSGTDY | | |
| CD8 hinge | | SLTISNLEQEDIATYFCQQGNTLPYTFGGGT | | |
| and | | KLEITGGGGSGGGGSGGGGSEVKLQESGPG | | |
| transmembrane | | LVAPSQSLSVTCTVSGVSLPDYGVSWIRQPP | | |
| Domain; 4- | | RKGLEWLGVIWGSETTYYNSALKSRLTIIKD | | |
| 1BB | | NSKSQVFLKMNSLQTDDTAIYYCAKHYYY | | |
| intracellular | | GGSYAMDYWGQGTSVTVSSTTTPAPRPPTP | | |
| signaling | | APTIASQPLSLRPEACRPAAGGAVHTRGLDF | | |
| domain; CD3 | | ACDIYIWAPLAGTCGVLLLSLVITLYCKRGR | | |
| zeta signaling | | KKLLYIFKQPFMRPVQTTQEEDGCSCRFPEE | | |
| domain; | | EEGGCELRVKFSRSADAPAYKQGQNQLYN | | |
| Flexible G/S | | ELNLGRREEYDVLDKRRGRDPEMGGKPRR | | |
| rich linker; | | KNPQEGLYNELQKDKMAEAYSEIGMKGER | | |
| BamHI Site; | | RRGKGHDGLYQGLSTATKDTYDALHMQAL | | |
| P2A cleavage | | PPRGSATNFSLLKQAGDVEENPGPMCHQQL | | |
| site; p40 | | VISWFSLVFLASPLVAIWELKKDVYVVELD | | |
| signal | | WYPDAPGEMVVLTCDTPEEDGITWTLDQSS | | |
| sequence; | | EVLGSGKTLTIQVKEFGDAGQYTCHKGGEV | | |
| IL12B (p40) | | LSHSLLLLHKKEDGIWSTDILKDQKEPKNKT | | |
| (23-328 of | | FLRCEAKNYSGRFTCWWLTTISTDLTFSVKS | | |
| WT); Linker | | SRGSSDPQGVTCGAATLSAERVRGDNKEYE | | |
| ((G4S)3); | | YSVECQEDSACPAAEESLPIEVMVDAVHKL | | |
| Flexible G/S | | KYENYTSSFFIRDIIKPDPPKNLQLKPLKNSR | | |
| rich linker; | | QVEVSWEYPDTWSTPHSYFSLTFCVQVQGK | | |
| IL12A (p35) | | SKREKKDRVFTDKTSATVICRKNASISVRAQ | | |
| (57-253 of | | DRYYSSSWSEWASVPCSGGGGSGGGGSGG | | |
| WT); | | GGSRNLPVATPDPGMFPCLHHSQNLLRAVS | | |
| Artificial | | NMLQKARQTLEFYPCTSEEIDHEDITKDKTS | | |
| linker | | TVEACLPLELTKNESCLNSRETSFITNGSCLA | | |
| (GSSG); | | SRKTSFMMALCLSSIYEDLKMYQVEFKTMN | | |
| ecDHFR | | AKLLMDPKRQIFLDQNMLAVIDELMQALNF | | |
| (M1del, | | NSETVPQKSSLEEPDFYKTKIKLCILLHAFRI | | |
| RI2Y. | | RAVTIDRVMSYLNASGSSGISLIAALAVDYV | | |
| Y100I); stop) | | IGMENAMPWNLPADLAWFKRNTLNKPVIM | | |
| (OT-CD19- | | GRHTWESIGRPLPGRKNIILSSQPGTDDRVT | | |
| IL12-040) | | WVKSVDEAIAACGDVPEIMVIGGGRVIEQF | | |
| | | LPKAQKLYLTHIDAEVEGDTHFPDYEPDDW | | |
| | | ESVFSEFHDADAQNSHSYCFEILERR* | | |
| OT-001619 | Full | MALPVTALLLPLALLLHAARPDIQMTQTTS | 1125 | 1150 |
| (CD8a leader; | Construct | SLSASLGDRVTISCRASQDISKYLNWYQQKP | | |
| CD19 scFv; | | DGTVKLLIYHTSRLHSGVPSRFSGSGSGTDY | | |
| CD8 hinge | | SLTISNLEQEDIATYFCQQGNTLPYTFGGGT | | |
| and | | KLEITGGGGSGGGGSGGGGSEVKLQESGPG | | |
| transmembrane | | LVAPSQSLSVTCTVSGVSLPDYGVSWIRQPP | | |
| Domain; 4- | | RKGLEWLGVIWGSETTYYNSALKSRLTIIKD | | |
| 1BB | | NSKSQVFLKMNSLQTDDTAIYYCAKHYYY | | |
| intracellular | | GGSYAMDYWGQGTSVTVSSTTTPAPRPPTP | | |
| signaling | | APTIASQPLSLRPEACRPAAGGAVHTRGLDF | | |
| domain; CD3 | | ACDIYIWAPLAGTCGVLLLSLVITLYCKRGR | | |
| zeta signaling | | KKLLYIFKQPFMRPVQTTQEEDGCSCRFPEE | | |
| domain; | | EEGGCELRVKFSRSADAPAYKQGQNQLYN | | |
| Linker (GS); | | ELNLGRREEYDVLDKRRGRDPEMGGKPRR | | |
| BamHI Site; | | KNPQEGLYNELQKDKMAEAYSEIGMKGER | | |
| P2A cleavage | | RRGKGHDGLYQGLSTATKDTYDALHMQAL | | |
| site; p40 | | PPRGSATNFSLLKQAGDVEENPGPMCHQQL | | |
| signal | | VISWFSLVFLASPLVAIWELKKDVYVVELD | | |
| sequence; | | WYPDAPGEMVVLTCDTPEEDGITWTLDQSS | | |
| IL12B (p40) | | EVLGSGKTLTIQVKEFGDAGQYTCHKGGEV | | |
| (23-328 of | | LSHSLLLLHKKEDGIWSTDILKDQKEPKNKT | | |
| WT); Linker | | FLRCEAKNYSGRFTCWWLTTISTDLTFSVKS | | |
| ((G4S)3); | | SRGSSDPQGVTCGAATLSAERVRGDNKEYE | | |
| Flexible G/S | | YSVECQEDSACPAAEESLPIEVMVDAVHKL | | |
| rich linker; | | KYENYTSSFFIRDIIKPDPPKNLQLKPLKNSR | | |
| IL12A (p35) | | QVEVSWEYPDTWSTPHSYFSLTFCVQVQGK | | |
| (57-253 of | | SKREKKDRVFTDKTSATVICRKNASISVRAQ | | |
| WT); Linker | | DRYYSSSWSEWASVPCSGGGGSGGGGSGG | | |
| (GS); BamHI | | GGSRNLPVATPDPGMFPCLHHSQNLLRAVS | | |
| Site; hDHFR | | NMLQKARQTLEFYPCTSEEIDHEDITKDKTS | | |
| (M1del, | | TVEACLPLELTKNESCLNSRETSFITNGSCLA | | |
| I17V); stop) | | SRKTSFMMALCLSSIYEDLKMYQVEFKTMN | | |
| (OT-CD19- | | AKLLMDPKRQIFLDQNMLAVIDELMQALNF | | |
| IL12-036) | | NSETVPQKSSLEEPDFYKTKIKLCILLHAFRI | | |
| | | RAVTIDRVMSYLNASGSVGSLNCIVAVSQN | | |
| | | MGVGKNGDLPWPPLRNEFRYFQRMTTTSS | | |
| | | VEGKQNLVIMGKKTWFSIPEKNRPLKGRIN | | |
| | | LVLSRELKEPPQGAHFLSRSLDDALKLTEQP | | |
| | | ELANKVDMVWIVGGSSVYKEAMNHPGHL | | |
| | | KLFVTRIMQDFESDTFFPEIDLEKYKLLPEYP | | |
| | | GVLSDVQEEKGIKYKFEVYEKND* | | |
| OT-001620 | Full | MALPVTALLLPLALLLHAARPDIQMTQTTS | 1126 | 1151 |
| (CD8a leader; | Construct | SLSASLGDRVTISCRASQDISKYLNWYQQKP | | |
| CD19 scFv; | | DGTVKLLIYHTSRLHSGVPSRFSGSGSGTDY | | |
| CD8 hinge | | SLTISNLEQEDIATYFCQQGNTLPYTFGGGT | | |
| and | | KLEITGGGGSGGGGSGGGGSEVKLQESGPG | | |
| transmembrane | | LVAPSQSLSVTCTVSGVSLPDYGVSWIRQPP | | |
| Domain; 4- | | RKGLEWLGVIWGSETTYYNSALKSRLTIIKD | | |
| 1BB | | NSKSQVFLKMNSLQTDDTAIYYCAKHYYY | | |
| intracellular | | GGSYAMDYWGQGTSVTVSSTTTPAPRPPTP | | |
| signaling | | APTIASQPLSLRPEACRPAAGGAVHTRGLDF | | |
| domain; CD3 | | ACDIYIWAPLAGTCGVLLLSLVITLYCKRGR | | |
| zeta signaling | | KKLLYIFKQPFMRPVQTTQEEDGCSCRFPEE | | |
| domain; | | EEGGCELRVKFSRSADAPAYKQGQNQLYN | | |
| Linker (GS); | | ELNLGRREEYDVLDKRRGRDPEMGGKPRR | | |
| BamHI Site; | | KNPQEGLYNELQKDKMAEAYSEIGMKGER | | |
| P2A cleavage | | RRGKGHDGLYQGLSTATKDTYDALHMQAL | | |
| site; p40 | | PPRGSATNFSLLKQAGDVEENPGPMCHQQL | | |
| signal | | VISWFSLVFLASPLVAIWELKKDVYVVELD | | |
| sequence; | | WYPDAPGEMVVLTCDTPEEDGITWTLDQSS | | |
| IL12B (p40) | | EVLGSGKTLTIQVKEFGDAGQYTCHKGGEV | | |
| (23-328 of | | LSHSLLLLHKKEDGIWSTDILKDQKEPKNKT | | |
| WT); Linker | | FLRCEAKNYSGRFTCWWLTTISTDLTFSVKS | | |
| ((G4S)3); | | SRGSSDPQGVTCGAATLSAERVRGDNKEYE | | |
| Flexible G/S | | YSVECQEDSACPAAEESLPIEVMVDAVHKL | | |
| rich linker; | | KYENYTSSFFIRDIIKPDPPKNLQLKPLKNSR | | |
| IL12A (p35) | | QVEVSWEYPDTWSTPHSYFSLTFCVQVQGK | | |
| (57-253 of | | SKREKKDRVFTDKTSATVICRKNASISVRAQ | | |
| WT); Linker | | DRYYSSSWSEWASVPCSGGGGSGGGGSGG | | |
| (GS); BamHI | | GGSRNLPVATPDPGMFPCLHHSQNLLRAVS | | |
| Site; hDHFR | | NMLQKARQTLEFYPCTSEEIDHEDITKDKTS | | |
| (M1del, I17V, | | TVEACLPLELTKNESCLNSRETSFITNGSCLA | | |
| Y122I); stop) | | SRKTSFMMALCLSSIYEDLKMYQVEFKTMN | | |
| (OT-CD19- | | AKLLMDPKRQIFLDQNMLAVIDELMQALNF | | |
| IL12-037) | | NSETVPQKSSLEEPDFYKTKIKLCILLHAFRI | | |
| | | RAVTIDRVMSYLNASGSVGSLNCIVAVSQN | | |
| | | MGVGKNGDLPWPPLRNEFRYFQRMTTTSS | | |
| | | VEGKQNLVIMGKKTWFSIPEKNRPLKGRIN | | |
| | | LVLSRELKEPPQGAHFLSRSLDDALKLTEQP | | |
| | | ELANKVDMVWIVGGSSVIKEAMNHPGHLK | | |
| | | LFVTRIMQDFESDTFFPEIDLEKYKLLPEYPG | | |
| | | VLSDVQEEKGIKYKFEVYEKND* | | |
| OT-001621 | Full | MALPVTALLLPLALLLHAARPDIQMTQTTS | 1127 | 1152 |
| (CD8a leader; | Construct | SLSASLGDRVTISCRASQDISKYLNWYQQKP | | |
| CD19 scFv; | | DGTVKLLIYHTSRLHSGVPSRFSGSGSGTDY | | |
| CD8 hinge | | SLTISNLEQEDIATYFCQQGNTLPYTFGGGT | | |
| and | | KLEITGGGGSGGGGSGGGGSEVKLQESGPG | | |
| transmembrane | | LVAPSQSLSVTCTVSGVSLPDYGVSWIRQPP | | |
| Domain; 4- | | RKGLEWLGVIWGSETTYYNSALKSRLTIIKD | | |
| 1BB | | NSKSQVFLKMNSLQTDDTAIYYCAKHYYY | | |
| intracellular | | GGSYAMDYWGQGTSVTVSSTTTPAPRPPTP | | |
| signaling | | APTIASQPLSLRPEACRPAAGGAVHTRGLDF | | |
| domain; CD3 | | ACDIYIWAPLAGTCGVLLLSLVITLYCKRGR | | |
| zeta signaling | | KKLLYIFKQPFMRPVQTTQEEDGCSCRFPEE | | |
| domain; | | EEGGCELRVKFSRSADAPAYKQGQNQLYN | | |
| Linker (GS); | | ELNLGRREEYDVLDKRRGRDPEMGGKPRR | | |
| BamHI Site; | | KNPQEGLYNELQKDKMAEAYSEIGMKGER | | |
| P2A cleavage | | RRGKGHDGLYQGLSTATKDTYDALHMQAL | | |
| site; p40 | | PPRGSATNFSLLKQAGDVEENPGPMCHQQL | | |
| signal | | VISWFSLVFLASPLVAIWELKKDVYVVELD | | |
| sequence; | | WYPDAPGEMVVLTCDTPEEDGITWTLDQSS | | |
| IL12B (p40) | | EVLGSGKTLTIQVKEFGDAGQYTCHKGGEV | | |
| (23-328 of | | LSHSLLLLHKKEDGIWSTDILKDQKEPKNKT | | |
| WT); Linker | | FLRCEAKNYSGRFTCWWLTTISTDLTFSVKS | | |
| ((G4S)3); | | SRGSSDPQGVTCGAATLSAERVRGDNKEYE | | |
| Flexible G/S | | YSVECQEDSACPAAEESLPIEVMVDAVHKL | | |
| rich linker; | | KYENYTSSFFIRDIIKPDPPKNLQLKPLKNSR | | |
| IL12A (p35) | | QVEVSWEYPDTWSTPHSYFSLTFCVQVQGK | | |
| (57-253 of | | SKREKKDRVFTDKTSATVICRKNASISVRAQ | | |
| WT); Linker | | DRYYSSSWSEWASVPCSGGGGSGGGGSGG | | |
| (GS); BamHI | | GGSRNLPVATPDPGMFPCLHHSQNLLRAVS | | |
| Site; hDHFR | | NMLQKARQTLEFYPCTSEEIDHEDITKDKTS | | |
| (M1del, | | TVEACLPLELTKNESCLNSRETSFITNGSCLA | | |
| Y122I, | | SRKTSFMMALCLSSIYEDLKMYQVEFKTMN | | |
| N127Y); stop) | | AKLLMDPKRQIFLDQNMLAVIDELMQALNF | | |
| (OT-CD19- | | NSETVPQKSSLEEPDFYKTKIKLCILLHAFRI | | |
| IL12-038) | | RAVTIDRVMSYLNASGSVGSLNCIVAVSQN | | |
| | | MGIGKNGDLPWPPLRNEFRYFQRMTTTSSV | | |
| | | EGKQNLVIMGKKTWFSIPEKNRPLKGRINL | | |
| | | VLSRELKEPPQGAHFLSRSLDDALKLTEQPE | | |
| | | LANKVDMVWIVGGSSVIKEAMYHPGHLKL | | |
| | | FVTRIMQDFESDTFFPEIDLEKYKLLPEYPG | | |
| | | VLSDVQEEKGIKYKFEVYEKND* | | |
| OT-001612 | Full | — | — | 1153 |
| (CD8a leader; | Construct | | | |
| CD19 scFv: | Encoded | MALPVTALLLPLALLLHAARPDIQMTQTTS | 1132 | 1154 |
| CD8 hinge | Protein 1 | SLSASLGDRVTISCRASQDISKYLNWYQQKP | | |
| and | | DGTVKLLIYHTSRLHSGVPSRFSGSGSGTDY | | |
| transmembrane | | SLTISNLEQEDIATYFCQQGNTLPYTFGGGT | | |
| Domain; 4- | | KLEITGGGGSGGGGSGGGGSEVKLQESGPG | | |
| 1BB | | LVAPSQSLSVTCTVSGVSLPDYGVSWIRQPP | | |
| intracellular | | RKGLEWLGVIWGSETTYYNSALKSRLTIIKD | | |
| signaling | | NSKSQVFLKMNSLQTDDTAIYYCAKHYYY | | |
| domain; CD3 | | GGSYAMDYWGQGTSVTVSSTTTPAPRPPTP | | |
| zeta signaling | | APTIASQPLSLRPEACRPAAGGAVHTRGLDF | | |
| domain; stop; | | ACDIYIWAPLAGTCGVLLLSLVITLYCKRGR | | |
| spacer | | KKLLYIFKQPFMRPVQTTQEEDGCSCRFPEE | | |
| (ATCGGGCT | | EEGGCELRVKFSRSADAPAYKQGQNQLYN | | |
| AGC); IRES; | | ELNLGRREEYDVLDKRRGRDPEMGGKPRR | | |
| Spacer | | KNPQEGLYNELQKDKMAEAYSEIGMKGER | | |
| (gcttgccacaacc | | RRGKGHDGLYQGLSTATKDTYDALHMQAL | | |
| cacaaggagacga | | PPR* | | |
| ccttcc); p40 | Encoded | MCHQQLVISWFSLVFLASPLVAIWELKKDV | 1133 | 1155 |
| signal | Protein 2 | YVVELDWYPDAPGEMVVLTCDTPEEDGIT | | |
| sequence; | | WTLDQSSEVLGSGKTLTIQVKEFGDAGQYT | | |
| IL12B (p40) | | CHKGGEVLSHSLLLLHKKEDGIWSTDILKD | | |
| (23-328 of | | QKEPKNKTFLRCEAKNYSGRFTCWWLTTIS | | |
| WT); Linker | | TDLTFSVKSSRGSSDPQGVTCGAATLSAER | | |
| ((G4S)3); | | VRGDNKEYEYSVECQEDSACPAAEESLPIE | | |
| Flexible G/S | | VMVDAVHKLKYENYTSSFFIRDIIKPDPPKN | | |
| rich linker, | | LQLKPLKNSRQVEVSWEYPDTWSTPHSYFS | | |
| IL12A (p35) | | LTFCVQVQGKSKREKKDRVFTDKTSATVIC | | |
| (57-253 of | | RKNASISVRAQDRYYSSSWSEWASVPCSGG | | |
| WT); | | GGSGGGGSGGGGSRNLPVATPDPGMFPCLH | | |
| Artificial | | HSQNLLRAVSNMLQKARQTLEFYPCTSEEI | | |
| linker | | DHEDITKDKTSTVEACLPLELTKNESCLNSR | | |
| (GGSGG); | | ETSFITNGSCLASRKTSFMMALCLSSIYEDL | | |
| hDHFR | | KMYQVEFKTMNAKLLMDPKRQIFLDQNML | | |
| (M1del, | | AVTDELMQALNFNSETVPQKSSLEEPDFYKT | | |
| I17V); | | KIKLCILLHAFRIRAVTIDRVMSYLNASGGS | | |
| stop)(OT- | | GGVGSLNCIVAVSQNMGVGKNGDLPWPPL | | |
| CD19-IL12- | | RNEFRYFQRMTTTSSVEGKQNLVIMGKKT | | |
| 014) | | WFSIPEKNRPLKGRINLVLSRELKEPPQGAH | | |
| | | FLSRSLDDALKLTEQPELANKVDMVWIVGG | | |
| | | SSVYKEAMNHPGHLKLFVTRIMQDFESDTF | | |
| | | FPEIDLEKYKLLPEYPGVLSDVQEEKGIKYK | | |
| | | FEVYEKND* | | |
| OT-001613 | Full | — | — | 1156 |
| (CD8a leader; | Construct | | | |
| CD 19 scFv; | Encoded | MALPVTALLLPLALLLHAARPDIQMTQTTS | 1134 | 1157 |
| CDS hinge | Protein 1 | SLSASLGDRVTISCRASQDISKYLNWYQQKP | | |
| and | | DGTVKLLIYHTSRLHSGVPSRFSGSGSGTDY | | |
| transmembrane | | SLTISNLEQEDIATYFCQQGNTLPYTFGGGT | | |
| domain; 4- | | KLEITGGGGSGGGGSGGGGSEVKLQESGPG | | |
| 1BB | | LVAPSQSLSVTCTVSGVSLPDYGVSWIRQPP | | |
| intracellular | | RKGLEWLGVIWGSETTYYNSALKSRLTIIKD | | |
| signaling | | NSKSQVFLKMNSLQTDDTAIYYCAKHYYY | | |
| domain; CD3 | | GGSYAMDYWGQGTSVTVSSTTTPAPRPPTP | | |
| zeta signaling | | APTIASQPLSLRPEACRPAAGGAVHTRGLDF | | |
| domain; stop; | | ACDIYIWAPLAGTCGVLLLSLVITLYCKRGR | | |
| spacer | | KKLLYIFKQPFMRPVQTTQEEDGCSCRFPEE | | |
| (ATCGGGCT | | EEGGCELRVKFSRSADAPAYKQGQNQLYN | | |
| AGC); IRES; | | ELNLGRREEYDVLDKRRGRDPEMGGKPRR | | |
| Spacer | | KNPQEGLYNELQKDKMAEAYSEIGMKGER | | |
| (gcttgccacaacc | | RRGKGHDGLYQGLSTATKDTYDALHMQAL | | |
| cacaaggagacga | | PPR* | | |
| ccttcc); p40 | Encoded | MCHQQLVISWFSLVFLASPLVAIWELKKDV | 1135 | 1158 |
| signal | Protein 2 | YVVELDWYPDAPGEMVVLTCDTPEEDGIT | | |
| sequence; | | WTLDQSSEVLGSGKTLTIQVKEFGDAGQYT | | |
| IL12B (p40) | | CHKGGEVLSHSLLLLHKKEDGIWSTDILKD | | |
| (23-328 of | | QKEPKNKTFLRCEAKNYSGRFTCWWLTTIS | | |
| WT); Linker | | TDLTFSVKSSRGSSDPQGVTCGAATLSAER | | |
| Artificial | | VRGDNKEYEYSVECQEDSACPAAEESLPIE | | |
| linker | | VMVDAVHKLKYENYTSSFFIRDIIKPDPPKN | | |
| (GGSGG); | | LQLKPLKNSRQVEVSWEYPDTWSTPHSYFS | | |
| hDHFR | | LTFCVQVQGKSKREKKDRVFTDKTSATVIC | | |
| (M1del, | | RKNASISVRAQDRYYSSSWSEWASVPCSGG | | |
| Y122I); | | GGSGGGGSGGGGSRNLPVATPDPGMFPCLH | | |
| stop) (OT- | | HSQNLLRAVSNMLQKARQTLEFYPCTSEEI | | |
| CD19-IL12- | | DHEDITKDKTSTVEACLPLELTKNESCLNSR | | |
| 015) | | ETSFITNGSCLASRKTSFMMALCLSSIYEDL | | |
| | | KMYQVEFKTMNAKLLMDPKRQIFLDQNML | | |
| | | AVIDELMQALNFNSETVPQKSSLEEPDFYKT | | |
| | | KKLCILLHAFRIRAVTIDRVMSYLNASGGS | | |
| | | GGVGSLNCIVAVSQNMGIGKNGDLPWPPLR | | |
| | | NEFRYFQRMTTTSSVEGKQNLVIMGKKTW | | |
| | | FSIPEKNRPLKGRINLVLSRELKEPPQGAHFL | | |
| | | SRSLDDALKLTEQPELANKVDMVWIVGGSS | | |
| | | VKEAMNHPGHLKLFVTRIMQDFESDTFFPE | | |
| | | IDLEKYKLLPEYPGVLSDVQEEKGIKYKFEV | | |
| | | YEKND* | | |
| OT-001614 | Full | — | — | 1159 |
| (CD8a leader; | Construct | | | |
| CD 19 scFv; | Encoded | MALPVTALLLPLALLLHAARPDIQMTQTTS | 1136 | 1160 |
| CD8 liinge | Protein 1 | SLSASLGDRVTISCRASQDISKYLNWYQQKP | | |
| and | | DGTVKLLIYHTSRLHSGVPSRFSGSGSGTDY | | |
| transmembrane | | SLTISNLEQEDIATYFCQQGNTLPYTFGGGT | | |
| domain; 4- | | KLEITGGGGSGGGGSGGGGSEVKLQESGPG | | |
| 1BB | | LVAPSQSLSVTCTVSGVSLPDYGVSWIRQPP | | |
| intracellular | | RKGLEWLGVIWGSETTYYNSALKSRLTIIKD | | |
| signaling | | NSKSQVFLKMNSLQTDDTAIYYCAKHYYY | | |
| domain; CD3 | | GGSYAMDYWGQGTSVTVSSTTTPAPRPPTP | | |
| zeta signaling | | APTIASQPLSLRPEACRPAAGGAVHTRGLDF | | |
| domain; stop; | | ACDIYIWAPLAGTCGVLLLSLVITLYCKRGR | | |
| spacer | | KKLLYIFKQPFMRPVQTTQEEDGCSCRFPEE | | |
| (ATCGGGCT | | EEGGCELRVKFSRSADAPAYKQGQNQLYN | | |
| AGC); IRES; | | ELNLGRREEYDVLDKRRGRDPEMGGKPRR | | |
| Spacer | | KNPQEGLYNELQKDKMAEAYSEIGMKGER | | |
| (gcttgccacaacc | | RRGKGHDGLYQGLSTATKDTYDALHMQAL | | |
| cacaaggagacga | | PPR* | | |
| ccttcc); p40 | Encoded | MCHQQLVISWFSLVFLASPLVAIWELKKDV | 1137 | 1161 |
| signal | Protein 2 | YVVELDWYPDAPGEMVVLTCDTPEEDGIT | | |
| sequence; | | WTLDQSSEVLGSGKTLTIQVKEFGDAGQYT | | |
| IL12B (p40) | | CHKGGEVLSHSLLLLHKKEDGIWSTDILKD | | |
| (23-328 of | | QKEPKNKTFLRCEAKNYSGRFTCWWLTTIS | | |
| WT); Linker | | TDLTFSVKSSRGSSDPQGVTCGAATLSAER | | |
| ((G4S)3); | | VRGDNKEYEYSVECQEDSACPAAEESLPIE | | |
| Flexible G/S | | VMVDAVHKLKYENYTSSFFIRDIIKPDPPKN | | |
| rich linker, | | LQLKPLKNSRQVEVSWEYPDTWSTPHSYFS | | |
| 1L12A (p35) | | LTFCVQVQGKSKREKKDRVFTDKTSATVIC | | |
| (57-253 of | | RKNASISVRAQDRYYSSSWSEWASVPCSGG | | |
| WT); | | GGSGGGGSGGGGSRNLPVATPDPGMFPCLH | | |
| Artificial | | HSQNLLRAVSNMLQKARQTLEFYPCTSEEI | | |
| linker | | DHEDITKDKTSTVEACLPLELTKNESCLNSR | | |
| (GGSGG); | | ETSFITNGSCLASRKTSFMMALCLSSIYEDL | | |
| hDHFR | | KMYQVEFKTMNAKLLMDPKRQIFLDQNML | | |
| (M1del, | | AVIDELMQALNFNSETVPQKSSLEEPDFYKT | | |
| I17A); stop) | | KKLCILLHAFRIRAVTIDRVMSYLNASGGS | | |
| (OT-CD19- | | GGVGSLNCIVAVSQNMGAGKNGDLPWPPL | | |
| 1L12-016) | | RNEFRYFQRMTTTSSVEGKQNLVIMGKKT | | |
| | | WFSIPEKNRPLKGRINLVLSRELKEPPQGAH | | |
| | | FLSRSLDDALKLTEQPELANKVDMVWIVGG | | |
| | | SSVYKEAMNHPGHLKLFVTRIMQDFESDTF | | |
| | | FPEIDLEKYKLLPEYPGVLSDVQEEKGIKYK | | |
| | | FEVYEKND* | | |
| OT-001615 | Full | — | — | 1162 |
| (CD8a leader; | Construct | | | |
| CD 19 scFv; | | | | |
| CD8 liinge | Encoded | MALPVTALLLPLALLLHAARPDIQMTQTTS | 1138 | 1163 |
| and | Protein 1 | SLSASLGDRVTISCRASQDISKYLNWYQQKP | | |
| Transmembrane | | DGTVKLLIYHTSRLHSGVPSRFSGSGSGTDY | | |
| Domain; 4- | | SLTISNLEQEDIATYFCQQGNTLPYTFGGGT | | |
| 1BB | | KLEITGGGGSGGGGSGGGGSEVKLQESGPG | | |
| intracellular | | LVAPSQSLSVTCTVSGVSLPDYGVSWIRQPP | | |
| signaling | | RKGLEWLGVIWGSETTYYNSALKSRLTIIKD | | |
| domain; CD3 | | NSKSQVFLKMNSLQTDDTAIYYCAKHYYY | | |
| zeta signaling | | GGSYAMDYWGQGTSVTVSSTTTPAPRPPTP | | |
| domain; stop; | | APTIASQPLSLRPEACRPAAGGAVHTRGLDF | | |
| spacer | | ACDIYIWAPLAGTCGVLLLSLVITLYCKRGR | | |
| (ATCGGGCT | | KKLLYIFKQPFMRPVQTTQEEDGCSCRFPEE | | |
| AGC); IRES; | | EEGGCELRVKFSRSADAPAYKQGQNQLYN | | |
| Spacer | | ELNLGRREEYDVLDKRRGRDPEMGGKPRR | | |
| (gcttgccacaacc | | KNPQEGLYNELQKDKMAEAYSEIGMKGER | | |
| cacaaggagacga | | RRGKGHDGLYQGLSTATKDTYDALHMQAL | | |
| ccttcc); p40 | | PPR* | | |
| signal | Encoded | MCHQQLVISWFSLVFLASPLVAIWELKKDV | 1139 | 1164 |
| sequence; | Protein 2 | YVVELDWYPDAPGEMVVLTCDTPEEDGIT | | |
| IL12B (p40) | | WTLDQSSEVLGSGKTLTIQVKEFGDAGQYT | | |
| (23-328 of | | CHKGGEVLSHSLLLLHKKEDGIWSTDILKD | | |
| WT); Linker | | QKEPKNKTFLRCEAKNYSGRFTCWWLTTIS | | |
| ((G4S)3); | | TDLTFSVKSSRGSSDPQGVTCGAATLSAER | | |
| Flexible G/S | | VRGDNKEYEYSVECQEDSACPAAEESLPIE | | |
| rich linker, | | VMVDAVHKLKYENYTSSFFIRDIIKPDPPKN | | |
| IL12A (p35) | | LQLKPLKNSRQVEVSWEYPDTWSTPHSYFS | | |
| (57-253 of | | LTFCVQVQGKSKREKKDRVFTDKTSATVIC | | |
| WT); | | RKNASISVRAQDRYYSSSWSEWASVPCSGG | | |
| Artificial | | GGSGGGGSGGGGSRNLPVATPDPGMFPCLH | | |
| linker | | HSQNLLRAVSNMLQKARQTLEFYPCTSEEI | | |
| (GGSGG); | | DHEDITKDKTSTVEACLPLELTKNESCLNSR | | |
| hDHFR | | ETSFITNGSCLASRKTSFMMALCLSSIYEDL | | |
| (M1del, 117V, | | KMYQVEFKTMNAKLLMDPKRQIFLDQNML | | |
| Y1221); stop) | | AVIDELMQALNFNSETVPQKSSLEEPDFYKT | | |
| | | KIKLCILLHAFRIRAVTIDRVMSYLNASGGS | | |
| | | GGVGSLNCIVAVSQNMGVGKNGDLPWPPL | | |
| | | RNEFRYFQRMTTTSSVEGKQNLVIMGKKT | | |
| | | WFSIPEKNRPLKGRINLVLSRELKEPPQGAH | | |
| | | FLSRSLDDALKLTEQPELANKVDMVWIVGG | | |
| | | SSVIKEAMNHPGHLKLFVTRIMQDFESDTFF | | |
| | | PEIDLEKYKLLPEYPGVLSDVQEEKGIKYKF | | |
| | | EVYEKND* | | |
| OT-001616 | Full | — | — | 1165 |
| (CD8a leader; | Construct | | | |
| CD19 scFv; | Encoded | MALPVTALLLPLALLLHAARPDIQMTQTTS | 1140 | 1166 |
| CD8 lunge | Protein 1 | SLSASLGDRVTISCRASQDISKYLNWYQQKP | | |
| and | | DGTVKLLIYHTSRLHSGVPSRFSGSGSGTDY | | |
| transmembrane | | SLTISNLEQEDIATYFCQQGNTLPYTFGGGT | | |
| Domain; 4- | | KLEITGGGGSGGGGSGGGGSEVKLQESGPG | | |
| 1BB | | LVAPSQSLSVTCTVSGVSLPDYGVSWIRQPP | | |
| intracellular | | RKGLEWLGVIWGSETTYYNSALKSRLTIIKD | | |
| signaling | | NSKSQVFLKMNSLQTDDTAIYYCAKHYYY | | |
| domain; CD3 | | GGSYAMDYWGQGTSVTVSSTTTPAPRPPTP | | |
| zeta signaling | | APTIASQPLSLRPEACRPAAGGAVHTRGLDF | | |
| domain; stop; | | ACDIYIWAPLAGTCGVLLLSLVITLYCKRGR | | |
| spacer | | KKLLYIFKQPFMRPVQTTQEEDGCSCRFPEE | | |
| (ATCGGGCT | | EEGGCELRVKFSRSADAPAYKQGQNQLYN | | |
| AGC); IRES; | | ELNLGRREEYDVLDKRRGRDPEMGGKPRR | | |
| Spacer | | KNPQEGLYNELQKDKMAEAYSEIGMKGER | | |
| (gcttgccacaacc | | RRGKGHDGLYQGLSTATKDTYDALHMQAL | | |
| cacaaggagacga | | PPR* | | |
| ccttcc); p40 | Encoded | MCHQQLVISWFSLVFLASPLVAIWELKKDV | 1141 | 1167 |
| signal | Protein 2 | YVVELDWYPDAPGEMVVLTCDTPEEDGIT | | |
| sequence; | | WTLDQSSEVLGSGKTLTIQVKEFGDAGQYT | | |
| 1LI2B (p40) | | CHKGGEVLSHSLLLLHKKEDGIWSTDILKD | | |
| (23-328 of | | QKEPKNKTFLRCEAKNYSGRFTCWWLTTIS | | |
| WT); Linker | | TDLTFSVKSSRGSSDPQGVTCGAATLSAER | | |
| ((G4S)3); | | VRGDNKEYEYSVECQEDSACPAAEESLPIE | | |
| Flexible G/S | | VMVDAVHKLKYENYTSSFFIRDIIKPDPPKN | | |
| rich linker. | | LQLKPLKNSRQVEVSWEYPDTWSTPHSYFS | | |
| IL12A (p35) | | LTFCVQVQGKSKREKKDRVFTDKTSATVIC | | |
| (57-253 of | | RKNASISVRAQDRYYSSSWSEWASVPCSGG | | |
| WT); | | GGSGGGGSGGGGSRNLPVATPDPGMFPCLH | | |
| Artificial | | HSQNLLRAVSNMLQKARQTLEFYPCTSEEI | | |
| linker | | DHEDITKDKTSTVEACLPLELTKNESCLNSR | | |
| (GGSGG); | | ETSFITNGSCLASRKTSFMMALCLSSIYEDL | | |
| hDHFR | | KMYQVEFKTMNAKLLMDPKRQIFLDQNML | | |
| (M1del, I17A, | | AVIDELMQALNFNSETVPQKSSLEEPDFYKT | | |
| YI22I); stop) | | KIKLCILLHAFRIRAVTIDRVMSYLNASGGS | | |
| (OT-CD19- | | GGVGSLNCIVAVSQNMGAGKNGDLPWPPL | | |
| IL12-018) | | RNEFRYFQRMTTTSSVEGKQNLVIMGKKT | | |
| | | WFSIPEKNRPLKGRINLVLSRELKEPPQGAH | | |
| | | FLSRSLDDALKLTEQPELANKVDMVWIVGG | | |
| | | SSVIKEAMNHPGHLKLFVTRIMQDFESDTFF | | |
| | | PEIDLEKYKLLPEYPGVLSDVQEEKGIKYKF | | |
| | | EVYEKND* | | |
| OT-001458 | Full | MALPVTALLLPLALLLHAARPDIQMTQTTS | 1142 | 1168 |
| (CD8a leader; | Construct | SLSASLGDRVTISCRASQDISKYLNWYQQKP | | |
| CD19 scFv; | | DGTVKLLIYHTSRLHSGVPSRFSGSGSGTDY | | |
| CD8 hinge | | SLTISNLEQEDIATYFCQQGNTLPYTFGGGT | | |
| and | | KLEITGGGGSGGGGSGGGGSEVKLQESGPG | | |
| transmembrane | | LVAPSQSLSVTCTVSGVSLPDYGVSWIRQPP | | |
| domain; 4- | | RKGLEWLGVIWGSETTYYNSALKSRLTIIKD | | |
| 1BB | | NSKSQVFLKMNSLQTDDTAIYYCAKHYYY | | |
| intracellular | | GGSYAMDYWGQGTSVTVSSTTTPAPRPPTP | | |
| signaling | | APTIASQPLSLRPEACRPAAGGAVHTRGLDF | | |
| domain; CD3 | | ACDIYIWAPLAGTCGVLLLSLVITLYCKRGR | | |
| zeta signaling | | KKLLYIFKQPFMRPVQTTQEEDGCSCRFPEE | | |
| domain; | | EEGGCELRVKFSRSADAPAYKQGQNQLYN | | |
| Linker (GSG); | | ELNLGRREEYDVLDKRRGRDPEMGGKPRR | | |
| BamHl-Gly | | KNPQEGLYNELQKDKMAEAYSEIGMKGER | | |
| Site; P2A | | RRGKGHDGLYQGLSTATKDTYDALHMQAL | | |
| cleavage site; | | PPRGSGATNFSLLKQAGDVEENPGPMDWT | | |
| IgE Leader; | | WILFLVAAATRVHSNWVNVISDLKKIEDLIQ | | |
| IL15 (49-162 | | SMHIDATLYTESDVHPSCKVTAMKCFLLEL | | |
| ofWT); | | QVISLESGDASIHDTVENLIILANNSLSSNGN | | |
| Linker (SG3- | | VTESGCKECEELEEKNIKEFLQSFVHIVQMFI | | |
| (SG4)3-SG3- | | NTSSGGGSGGGGSGGGGSGGGGSGGGSLQI | | |
| SLQ)); | | TCPPPMSVEHADIWVKSYSLYSRERYICNSG | | |
| IL15Ra (31- | | FKRKAGTSSLTECVLNKATNVAHWTTPSLK | | |
| 267 of WT); | | CIRDPALVHQRPAPPSTVTTAGVTPQPESLS | | |
| stop) (OT- | | PSGKEPAASSPSSNNTAATTAAIVPGSQLMP | | |
| CD19-IL15- | | SKSPSTGTTEISSHESSHGTPSQTTAKNWELT | | |
| 007) | | ASASHQPPGVYPQGHSDTTVAISTSTVLLCG | | |
| | | LSAVSLLACYLKSRQTPPLASVEMEAMEAL | | |
| | | PVTWGTSSRDEDLENCSHHL* | | |

[0159] Constructs disclosed in Table 4, and Table 5, which are transcriptionally controlled by a CMV promoter, in some instances may be placed under the transcriptional control of a different promoter to test the role of promoters in CD19 CAR expression. In one embodiment, the CMV promoter may be replaced by an EF1a promoter. In one embodiment, the CMV promoter of the, OT-001010 OT-CD19-001) construct, may be replaced to generate OT-001399 (OT-CD19-055) construct, with a EF1a promoter.

[0160] In one embodiment, the construct is OT-001992 (OT-CD19-IL12-012) comprising the nucleotide sequence of SEQ ID NO. 1197. This construct's nucleotide sequence comprises a CAR component (SEQ ID NO. 1198 (which encodes SEQ ID NO. 1200)) and a FKBP DD regulated IL12 component (SEQ ID NO. 1199 (which encodes SEQ ID NO. 1201)) with an intervening IRES sequence (SEQ ID NO. 1213). The CAR component of OT-001992 comprises a CD8a leader (SEQ ID NO. 469, encoded by SEQ ID NO. 511), CD19 scFv (SEQ ID NO. 465, encoded by SEQ ID NO. 467), CD8a hinge-TM domain (SEQ ID NO.466, encoded by SEQ ID NO. 784), 4-1BB intracellular domain (SEQ ID NO. 233, encoded by SEQ ID NO. 785), and CD3 zeta signaling domain (SEQ ID NO. 299, encoded by SEQ ID NO. 786), stop region.

[0161] The FKBP DD regulated IL12 component comprises an Interleukin-12 subunit beta (p40) leader (SEQ ID NO. 559, encoded by SEQ ID NO. 572), Interleukin-12 subunit beta (p40) (23-328 of WT) (SEQ ID NO. 563, encoded by SEQ ID NO. 473), Linker ((G4S)3) (SEQ ID NO. 560, encoded by SEQ ID NO. 713), Interleukin-12 subunit alpha (p35) (57-253 of WT) (SEQ ID NO. 564 encoded by SEQ ID NO. 1214), Linker (GGS) (GGS, encoded by GGTGGATCC), Modified Furin Cleavage site (SEQ ID NO. 471, encoded by SEQ ID NO. 523), Linker (GSW) (GSW, encoded by GGATCCTGG), FKBP (M1del, E32G, F37V, R72G, K106E) (SEQ ID NO. 7, encoded by SEQ ID NO. 812).

[0162] In one embodiment, the CAR construct comprises a CD19 scFV (e.g., CAT13.1E10 or FMC63), a CD8a spacer or transmembrane domain, and a 4-1BB and CD3 endodomain. These constructs with CAT13.1E10 may have increased proliferation after stimulation in vitro, increased cytotoxicity against the CD19+ targets, and increased effector and target interactions as compared to constructs with FMC63.

[0163] In some embodiments, the payloads of the present invention may be tuned using the catalytic domains of the E3 ubiquitin ligases. The catalytic domains of E3 ligases may be fused to an antibody or a fragment of the antibody. The payload is fused to the antigen recognized by the antibody or a fragment of the antibody that is fused to the E3 ligases catalytic domain. The E3 ligases useful in the present invention include, but are not limited to Ring E3 ligase, HECT E3 ligases and RBR E3 ligases.

[0164] In some embodiments, the payload of the invention may be any of the co-stimulatory molecules and/or intracellular domains described herein. In some embodiments, one or more co-stimulatory molecules, each under the control of different SRE may be used in the present invention. SRE regulated co-stimulatory molecules may also be expressed in conjunction with a first-generation CAR, a second-generation CAR, a third generation CAR, a fourth generation, or any other CAR design described herein.

[0165] In one embodiment of the present invention, the payload of the invention is a CD33 specific CAR. The CD33 heavy and light chain may be combined with any of the signal peptides, transmembrane domains, costimulatory domains, intracellular domains and destabilizing domains described herein.

[0166] In some embodiments, the CAR of the present invention may be a tandem chimeric antigen receptor (TanCAR) which is able to target two, three, four, or more tumor specific antigens. In some aspects, The CAR is a bispecific TanCAR including two targeting domains which recognize two different TSAs on tumor cells. The bispecific CAR may be further defined as comprising an extracellular region comprising a targeting domain (e.g., an antigen recognition domain) specific for a first tumor antigen and a targeting domain (e.g., an antigen recognition domain) specific for a second tumor antigen. In other aspects, the CAR is a multispecific TanCAR that includes three or more targeting domains configured in a tandem arrangement. The space between the targeting domains in the TanCAR may be between about 5 and about 30 amino acids in length, for example, 6, 7, 8, 9, 10, 11, 12, 13, 14, 15, 16, 17, 18, 19, 20, 21, 22, 23, 24, 25, 26, 27, 28, 29 and 30 amino acids.

### Split CAR

[0167] In some embodiments, the components including the targeting moiety, transmembrane domain and intracellular signaling domains of the present invention may be split into two or more parts such that it is dependent on multiple inputs that promote assembly of the intact functional receptor. In one embodiment, the split synthetic CAR system can be constructed in which the assembly of an activated CAR receptor is dependent on the binding of a ligand to the SRE (e.g. a small molecule) and a specific antigen to the targeting moiety. As a non-limiting example, the split CAR consists of two parts that assemble in a small molecule-dependent manner; one part of the receptor features an extracellular antigen binding domain (e.g. scFv) and the other part has the intracellular signaling domains, such as the CD3ξ intracellular domain.

[0168] In other aspects, the split parts of the CAR system can be further modified to increase signal. In one example, the second part of cytoplasmic fragment may be anchored to the plasma membrane by incorporating a transmembrane domain (e.g., CD8αtransmembrane domain) to the construct. An additional extracellular domain may also be added to the second part of the CAR system, for instance an extracellular domain that mediates homo-dimerization. These modifications may increase receptor output activity, i.e., T cell activation.

[0169] In some aspects, the two parts of the split CAR system contain heterodimerization domains that conditionally interact upon binding of a heterodimerizing small molecule. As such, the receptor components are assembled in the presence of the small molecule, to form an intact system which can then be activated by antigen engagement. Any known heterodimerizing components can be incorporated into a split CAR system. Other small molecule dependent heterodimerization domains may also be used, including, but not limited to, gibberellin-induced dimerization system (GID1-GAI), trimethoprim-SLF induced ecDHFR and FKBP dimerization (Czlapinski et al., J Am Chem Soc., 2008, 130(40): 13186-13187) and ABA (abscisic acid) induced dimerization of PP2C and PYL domains (Cutler et al., Annu Rev Plant Biol. 2010, 61: 651-679). The dual regulation using inducible assembly (e.g., ligand dependent dimerization) and degradation (e.g., destabilizing domain induced CAR degradation) of the split CAR system may provide more flexibility to control the activity of the CAR modified T cells.

### Switchable CAR

[0170] In some embodiments, the CAR of the invention may be a switchable CAR. In this CAR design, a system is directly integrated in the hinge domain that separate the scFv domain from the cell membrane domain in the CAR. Such system is possible to split or combine different key functions of a CAR such as activation and costimulation within different chains of a receptor complex, mimicking the complexity of the TCR native architecture. This integrated system can switch the scFv and antigen interaction between on/off states controlled by the absence/presence of the stimulus.

### Reversible CAR

[0171] In other embodiments, the CAR of the invention may be a reversible CAR system. In this CAR architecture, a LID domain (ligand-induced degradation) is incorporated into the CAR system. The CAR can be temporarily down-regulated by adding a ligand of the LID domain. The combination of LID and DD mediated regulation provides tunable control of continuingly activated CAR T cells, thereby reducing CAR mediated tissue toxicity.

### Activation-Conditional CAR

[0172] In some embodiments, payloads of the invention may be an activation-conditional chimeric antigen receptor, which is only expressed in an activated immune cell. The expression of the CAR may be coupled to activation conditional control region which refers to one or more nucleic acid sequences that induce the transcription and/or expression of a sequence e.g. a CAR under its control. Such activation conditional control regions may be promoters of genes that are unregulated during the activation of the immune effector cell e.g. IL2 promoter or NFAT binding sites. In some embodiments, activation of the immune cell may be achieved by a constitutively expressed CAR.

### Universal CAR

[0173] In some embodiments, the payload of the present invention may be a Split Universal Programmable (SUPRA) CAR. A SUPRA CAR may be a two-component receptor system comprising of a universal receptor (zip CAR) expressed on T cells and a tumor-targeting scFv adaptor. The zip CAR universal receptor may be generated by the fusion of intracellular signaling domains and a leucine zipper as the extracellular domain. The tumor-targeting scFv adaptor molecule or zipFv, may be generated by the fusion of a cognate leucine zipper and an scFv. The scFv of the zipFv may bind to a tumor antigen, and the leucine zipper may bind and activate the zip CAR on the T cells. Unlike the conventional fixed CAR design, the SUPRA CAR modular design allows targeting of multiple antigens without further genetic manipulations of the immune cells.

### Cytokines, Chemokines and Other Soluble Factors

[0174] In accordance with the present invention, CARs of the present invention may be utilized along with other payloads of the present invention may be cytokines, chemokines, growth factors, and soluble proteins produced by immune cells, cancer cells and other cell types, which act as chemical communicators between cells and tissues within the body. These proteins mediate a wide range of physiological functions, from effects on cell growth, differentiation, migration and survival, to a number of effector activities. For example, activated T cells produce a variety of cytokines for cytotoxic function to eliminate tumor cells.

[0175] In some embodiments, payloads of the present invention may be cytokines, and fragments, variants, analogs and derivatives thereof, including but not limited to interleukins, tumor necrosis factors (TNFs), interferons (IFNs), TGF beta and chemokines. It is understood in the art that certain gene and/or protein nomenclature for the same gene or protein may be inclusive or exclusive of punctuation such as a dash “—” or symbolic such as Greek letters. Whether these are included or excluded herein, the meaning is not meant to be changed as would be understood by one of skill in the art. For example, IL2, IL2 and IL2 refer to the same interleukin. Likewise, TNF alpha, TNFα, TNF-alpha, TNF-α, TNF alpha and TNF a all refer to the same protein. In some embodiments, payloads of the present invention may be cytokines that stimulate immune responses. In other embodiments, payloads of the invention may be antagonists of cytokines that negatively impact anti-cancer immune responses.

[0176] In some embodiments, payloads of the present invention may be cytokine receptors, recombinant receptors, variants, analogs and derivatives thereof; or signal components of cytokines.

[0177] In some embodiments, cytokines of the present invention may be utilized to improve expansion, survival, persistence, and potency of immune cells such as CD8+T_{EM}, natural killer cells and tumor infiltrating lymphocytes (TIL) cells used for immunotherapy. In other embodiments, T cells engineered with two or more DD regulated cytokines are utilized to provide kinetic control of T cell activation and tumor microenvironment remodeling. In one aspect, the present invention provides biocircuits and compositions to minimize toxicity related to cytokine therapy. Despite its success in mitigating tumor burden, systemic cytokine therapy often results in the development of severe dose limiting side effects. Two factors contribute to the observed toxicity (a) Pleiotropism, wherein cytokines affect different cells types and sometimes produce opposing effects on the same cells depending on the context (b) Cytokines have short serum half-life and thus need to be administered at high doses to achieve therapeutic effects, which exacerbates the pleiotropic effects. In one aspect, cytokines of the present invention may be utilized to modulate cytokine expression in the event of adverse effects. In some embodiments, cytokines of the present invention may be designed to have prolonged life span or enhanced specificity to minimize toxicity.

[0178] In some embodiments, the payload of the present invention may be an interleukin (IL) cytokine. Interleukins (ILs) are a class of glycoproteins produced by leukocytes for regulating immune responses. As used herein, the term “interleukin (IL)” refers to an interleukin polypeptide from any species or source and includes the full-length protein as well as fragments or portions of the protein. In some aspects, the interleukin payload is selected from IL′, IL1alpha (also called hematopoietin-1), IL1beta (catabolin), IL1 delta, IL1epsilon, IL1eta, IL1 zeta, interleukin-1 family member 1 to 11 (IL1F1 to IL1F11), interleukin-1 homolog 1 to 4 (IL1H1 to IL1H4), IL1 related protein 1 to 3 (IL1RP1 to IL1RP3), IL2, IL3, IL4, IL5, IL6, IL7, IL8, IL9, IL10, IL10C, IL10D, IL11, IL11a, IL11b, IL12, IL13, IL14, IL15, IL16, IL17, IL17A, 1117B, IL17C, IL17E, IL17F, IL18, IL19, IL20, IL20 like (IL20L), 1121, IL22, IL23, IL23A, IL23-p19, IL23-p40, IL24, 1125, IL26, IL27, IL28A, IL28B, IL29, IL30, IL31, IL32, IL33, IL34, IL35, IL36 alpha, IL36 beta, IL36 gamma, IL36RN, IL37, IL37a, IL37b, IL37c, IL37d, IL37e and IL38. In other aspects, the payload of the present invention may be an interleukin receptor selected from CD121a, CDw121b, IL2Ra/CD25, IL2R13/CD122, IL2Ry/CD132, CDw131, CD124, CD131, CDw125, CD126, CD130, CD127, CDw210, IL8RA, IL11Ra, CD212, CD213α1, CD213α2, IL14R, IL15Ra, CDw217, IL18Rα, IL18Rβ, IL20Rα, and IL20Rβ.

[0179] In one embodiment, the payload of the invention may comprise IL12. IL12 is a heterodimeric protein of two subunits (p35, p40) that is secreted by antigen presenting cells, such as macrophages and dendritic cells. IL12 is type 1 cytokine that acts on natural killer (NK) cells, macrophages, CD8⁺ Cytotoxic T cells, and CD4⁺ T helper cells through STAT4 pathway to induce IFN-γ production in these effector immune cells (reviewed by Trinchieri G, Nat Rev Immunol. 2003; 3(2): 133-146). IL12 can promote the cytotoxic activity of NK cells and CD8⁺ T cells, therefore has anti-tumor function. Intravenous injection of recombinant IL12 exhibited modest clinical efficacy in a handful of patients with advanced melanoma and renal cell carcinoma (Gollob et al., Clin. Cancer Res. 2000; 6(5):1678-1692). IL12 has been used as an adjuvant to enhance cytotoxic immunity using a melanoma antigen vaccine, or using peptide pulsed peripheral blood mononuclear cells; and to promote NK cell activity in breast cancer with trastuzumab treatment. Local delivery of IL12 to the tumor microenvironment promotes tumor regression in several tumor models. These studies all indicate that locally increased IL12 level can promote anti-tumor immunity. One major obstacle of systemic or local administration of recombinant IL12 protein, or through oncolytic viral vectors is the severe side effects when IL12 is presented at high level. Developing a system that tightly controls IL12 level may provide a safe use of IL12 in cancer treatment.

[0180] In one aspect, the effector module of the invention may be a DD-IL12 fusion polypeptide. This regulatable DD-IL12 fusion polypeptide may be directly used as an immunotherapeutic agent or be transduced into an immune effector cell (T cells and TIL cells) to generate modified T cells with greater in vivo expansion and survival capabilities for adoptive cell transfer. The need for harsh preconditioning regimens in current adoptive cell therapies may be minimized using regulated IL12 DD-IL12 may be utilized to modify tumor microenvironment and increase persistence in solid tumors that are currently refractory to tumor antigen targeted therapy. In some embodiments, CAR expressing T cells may be armored with DD regulated IL12 to relieve immunosuppression without systemic toxicity.

[0181] In some embodiments, the IL12 may be a Flexi IL12, wherein both p35 and p40 subunits, are encoded by a single cDNA that produces a single chain polypeptide. The single chain polypeptide may be generated by placing p35 subunit at the N terminus or the C terminus of the single chain polypeptide. Similarly, the p40 subunit may be at the N terminus or C terminus of the single chain polypeptide. In some embodiments, the IL12 constructs of the invention may be placed under the transcriptional control of the CMV promoter (SEQ ID NO. 556, 1100), an EF1a promoter (SEQ ID NO. 557, 708, 1099, 1103) or a PGK promoter (SEQ ID NO. 558, 1101, 1102). Any portion of IL12 that retains one or more functions of full length or mature IL12 may be useful in the present invention. In some embodiments, IL12 constructs may be generated by different permutations and combinations of any of the linkers, promoters, cleavage sites and DDs described herein. In some embodiments, the DD may be placed at the N terminus of the construct. In some aspects, the DD may be placed at the C terminus of the construct.

[0182] In some aspects, the DD-IL12 comprises the amino acid sequences listed in Table 6. The amino acid sequences in Table 6 may comprise a stop codon which is denoted in the table with a “*” at the end of the amino acid sequence. In Table 6, “del” means deletion and “WT” means wild-type.

TABLE 6
DD-IL12 constructs

| | | | Amino | Nucleic |
|---|---|---|---|---|
| | | | acid | Acid |
| | | | SEQ ID | SEQ ID |
| Description | Promoter | Amino acid Sequence | NO | NO |
| p40 signal | — | MCHQQLVISWFSLVFLASPLVA | 559 | 567-575; |
| sequence | | | | 1215 |
| Linker | — | GGSGG | 470 | 519-520 |
| Linker | — | GGGGSGGGGSGGGGS | 560 | 710-715 |
| Linker | | GS | — | GGATCC |
| P2A | — | ATNFSLLKQAGDVEENPGP | 576 | 577 |
| Cleavable | | | | |
| Peptide | | | | |
| Furin | — | SARNRQKRS | 561 | 581 |
| cleavage site | | | | |
| Furin | — | ARNRQKRS | 562 | 582 |
| cleavage site | | | | |
| Modified | — | ESRRVRRNKRSK | 471 | 521-522 |
| Furin | | | | |
| P2A | — | GATNFSLLKQAGDVEENPGP | 725 | 726 |
| Cleavable | | | | |
| Peptide | | | | |
| p40 (WT) | | MCHQQLVISWFSLVFLASPLVAIWELKKDV | 1091 | 1092 |
| | | YVVELDWYPDAPGEMVVLTCDTPEEDGITW | | |
| | | TLDQSSEVLGSGKTLTIQVKEFGDAGQYTCH | | |
| | | KGGEVLSHSLLLLHKKEDGIWSTDILKDQKE | | |
| | | PKNKTFLRCEAKNYSGRFTCWWLTTISTDLT | | |
| | | FSVKSSRGSSDPQGVTCGAATLSAERVRGDN | | |
| | | KEYEYSVECQEDSACPAAEESLPIEVMVDAV | | |
| | | HKLKYENYTSSFFIRDIIKPDPPKNLQLKPL | | |
| | | NSRQVEVSWEYPDTWSTPHSYFSLTFCVQV | | |
| | | QKGKSKREKKDRVFTDKTSATVICRKNASIS | | |
| | | VRAQDRYYSSSWSEWASVPCS | | |
| p40 (23-328 | — | IWELKKDVYVVELDWYPDAPGEMVVLTCDT | 563 | 583-791, |
| of WT) | | PEEDGITWTLDQSSEVLGSGKTLTIQVKEFG | | 472-474 |
| | | DAGQYTCHKGGEVLSHSLLLLHKKEDGIWS | | |
| | | TDILKDQKEPKNKTFLRCEAKNYSGRFTCW | | |
| | | WLTTISTDLTFSVKSSRGSSDPQGVTCGAAT | | |
| | | LSAERVRGDNKEYEYSVECQEDSACPAAEES | | |
| | | LPIEVMVDAVHKLKYENYTSSFFIRDIIKPDP | | |
| | | PKNLQLKPLKNSRQVEVSWEYPDTWSTPHS | | |
| | | YFSLTFCVQVQGKSKREKKDRVFTDKTSAT | | |
| | | VICRKNASISVRAQDRYYSSSWSEWASVPCS | | |
| p40 (23-328 | — | IWELKKDVYVVELDWYPDAPGEMVVLTCD | 578 | 579 |
| of WT) | | TPEEDGITWTLDQSSEVLGSGKTLTIQVKEFG | | |
| (K217N) | | DAGQYTCHKGGEVLSHSLLLLHKKEDGIWS | | |
| | | TDILKDQKEPKNKTFLRCEAKNYSGRFTCW | | |
| | | WLTTISTDLTFSVKSSRGSSDPQGVTCGAAT | | |
| | | LSAERVRGDNKEYEYSVECQEDSACPAAEES | | |
| | | LPIEVMVDAVHKLKYENYTSSFFIRDIIKPDP | | |
| | | PNNLQLKPLKNSRQVEVSWEYPDTWSTPHS | | |
| | | YFSLTFCVQVQGKSKREKKDRVFTDKTSAT | | |
| | | VICRKNASISVRAQDRYYSSSWSEWASVPCS | | |
| p35 (WT) | — | MWPPGSASQPPPSPAAATGLHPAARPVSLQC | 1093 | 1094 |
| | | RLSMCPARSLLLVATLVLLDHLSLARNLPVA | | |
| | | TPDPGMFPCLHHSQNLLRAVSNMLQKARQT | | |
| | | LEFYPCTSEEIDHEDITKDKTSTVEACLPLELT | | |
| | | KNESCLNSRETSFITNGSCLASRKTSFMMAL | | |
| | | CLSSIYEDLKMYQVEFKTMNAKLLMDPKRQ | | |
| | | IFLDQNMLAVIDELMQALNFNSETVPQKSSL | | |
| | | EEPDFYKTKIKLCILLHAFRIRAVTIDRVMSY | | |
| | | LNAS | | |
| p35 (57-253 | — | RNLPVATPDPGMFPCLHHSQNLLRAVSNML | 564 | 593-602, |
| of WT) | | QKARQTLEFYPCTSEEIDHEDITKDKTSTVEA | | 811 |
| | | CLPLELTKNESCLNSRETSFITNGSCLASRKT | | |
| | | SFMMALCLSSIYEDLKMYQVEFKTMNAKLL | | |
| | | MDPKRQIFLDQNMLAVIDELMQALNFNSET | | |
| | | VPQKSSLEEPDFYKTKIKLCILLHAFRIRAVTI | | |
| | | DRVMSYLNAS | | |
| ecDHFR | — | ISLIAALAVDYVIGMENAMPWNLPADLAWF | 4 | 532, 603, |
| (M1del, | | KRNTLNKPVIMGRHTWESIGRPLPGRKNIILS | | 641, 527, |
| R12Y, | | SQPGTDDRVTWVKSVDEAIAACGDVPEIMVI | | 788, 791 |
| Y100I) | | GGGRVIEQFLPKAQKLYLTHIDAEVEGDTHF | | |
| | | PDYEPDDWESVFSEFHDADAQNSHSYCFEIL | | |
| | | ERR | | |
| FKBP | — | GVQVETISPGDGRTFPKRGQTCVVHYTGML | 6 | 524-526, |
| (M1del, | | EDGKKVDSSRDRNKPFKFMLGKQEVIRGWE | | 787, 789 |
| F37V, | | EGVAQMSVGQRAKLTISPDYAYGATGHPGII | | |
| L107P) | | PPHATLVFDVELLKPE | | |
| FKBP | — | GVQVETISPGDGRTFPKRGQTCVVHYTGML | 7 | 528-531, |
| (M1del, | | GDGKKVDSSRDRNKPFKFMLGKQEVIRGWE | | 794, 812, |
| E32G, | | EGVAQMSVGQGAKLTISPDYAYGATGHPGII | | 827; 1236 |
| F37V, | | PPHATLVFDVELLELE | | |
| R72G, | | | | |
| K106E) | | | | |
| hDHFR | — | VGSLNCIVAVSQNMGIGKNGDLPWPPLRNEF | 8 | 604 |
| (M1del, | | RYFFRMTTTSSVEGKQNLVIMGKKTWFSIPE | | |
| Q36F, | | KNRPLKGRINLVLSRELKEPPQGAHFLSRSLD | | |
| Y122I, | | DALKLTEQPELANKVDMVWIVGGSSVIKEF | | |
| A125F) | | MNHPGHLKLFVTRIMQDFESDTFFPEIDLEK | | |
| | | YKLLPEYPGVLSDVQEEKGIKYKFEVYEKND | | |
| hDHFR | — | VGSLNCIVAVSQNMGVGKNGDLPWPPLRNE | 695 | 779 |
| (M1del, | | FRYFQRMTTTSSVEGKQNLVIMGKKTWFSIP | | |
| I17V) | | EKNRPLKGRINLVLSRELKEPPQGAHFLSRSL | | |
| | | DDALKLTEQPELANKVDMVWIVGGSSVYKE | | |
| | | AMNHPGHLKLFVTRIMQDFESDTFFPEIDLE | | |
| | | KYKLLPEYPGVLSDVQEEKGIKYKFEVYEKN | | |
| | | D | | |
| hDHFR | — | VGSLNCIVAVSQNMGIGKNGDLPWPPLRNEF | 696 | 534, 795 |
| (M1del, | | RYFQRMTTTSSVEGKQNLVIMGKKTWFSIPE | | |
| Y122I) | | KNRPLKGRINLVLSRELKEPPQGAHFLSRSLD | | |
| | | DALKLTEQPELANKVDMVWIVGGSSVIKEA | | |
| | | MNHPGHLKLFVTRIMQDFESDTFFPEIDLEK | | |
| | | YKLLPEYPGVLSDVQEEKGIKYKFEVYEKND | | |
| OT-001098 | EF1a | MCHQQLVISWFSLVFLASPLVAIWELKKDV | 566 | 610 |
| (p40 signal | | YVVELDWYPDAPGEMVVLTCDTPEEDGITW | | |
| sequence; | | TLDQSSEVLGSGKTLTIQVKEFGDAGQYTCH | | |
| p40 (23-328 | | KGGEVLSHSLLLLHKKEDGIWSTDILKDQKE | | |
| of WT); | | PKNKTFLRCEAKNYSGRFTCWWLTTISTDLT | | |
| linker | | FSVKSSRGSSDPQGVTCGAATLSAERVRGDN | | |
| (G4S)3; p35 | | KEYEYSVECQEDSACPAAEESLPIEVMVDAV | | |
| (57-253 of | | HKLKYENYTSSFFIRDIIKPDPPKNLQLKPLK | | |
| WT); stop) | | NSRQVEVSWEYPDTWSTPHSYFSLTFCVQV | | |
| (OT-IL12— | | QGKSKREKKDRVFTDKTSATVICRKNASISV | | |
| 020) | | RAQDRYYSSSWSEWASVPCSGGGGSGGGGS | | |
| | | GGGGSRNLPVATPDPGMFPCLHHSQNLLRA | | |
| | | VSNMLQKARQTLEFYPCTSEEIDHEDITKDK | | |
| | | TSTVEACLPLELTKNESCLNSRETSFITNGSC | | |
| | | LASRKTSFMMALCLSSIYEDLKMYQVEFKT | | |
| | | MNAKLLMDPKRQIFLDQNMLAVIDELMQAL | | |
| | | NFNSETVPQKSSLEEPDFYKTKIKLCILLHAF | | |
| | | RIRAVTIDRVMSYLNAS* | | |
| OT-001104 | PGK | MCHQQLVISWFSLVFLASPLVAIWELKKDV | 565 | 609 |
| (p40 signal | | YVVELDWYPDAPGEMVVLTCDTPEEDGITW | | |
| sequence; | | TLDQSSEVLGSGKTLTIQVKEFGDAGQYTCH | | |
| p40 (23-328 | | KGGEVLSHSLLLLHKKEDGIWSTDILKDQKE | | |
| of WT); | | PKNKTFLRCEAKNYSGRFTCWWLTTISTDLT | | |
| linker | | FSVKSSRGSSDPQGVTCGAATLSAERVRGDN | | |
| (G4S)3; p35 | | KEYEYSVECQEDSACPAAEESLPIEVMVDAV | | |
| (57-253 of | | HKLKYENYTSSFFIRDIIKPDPPKNLQLKPLK | | |
| WT); linker | | NSRQVEVSWEYPDTWSTPHSYFSLTFCVQV | | |
| (GGSG); | | QGKSKREKKDRVFTDKTSATVICRKNASISV | | |
| FKBP | | RAQDRYYSSSWSEWASVPCSGGGGSGGGGS | | |
| (M1del, | | GGGGSRNLPVATPDPGMFPCLHHSQNLLRA | | |
| E32G, | | VSNMLQKARQTLEFYPCTSEEIDHEDITKDK | | |
| F37V, | | TSTVEACLPLELTKNESCLNSRETSFITNGSC | | |
| R72G, | | LASRKTSFMMALCLSSIYEDLKMYQVEFKT | | |
| K106E); | | MNAKLLMDPKRQIFLDQNMLAVIDELMQAL | | |
| stop) (OT— | | NFNSETVPQKSSLEEPDFYKTKIKLCILLHAF | | |
| IL12-025) | | RIRAVTIDRVMSYLNASGGSGGVQVETISPG | | |
| | | DGRTFPKRGQTCVVHYTGMLGDGKKVDSS | | |
| | | RDRNKPFKFMLGKQEVIRGWEEGVAQMSV | | |
| | | GQGAKLTISPDYAYGATGHPGIIPPHATLVFD | | |
| | | VELLELE* | | |
| OT-001105 | EF1a | MCHQQLVISWFSLVFLASPLVAIWELKKDV | 565 | 609 |
| (p40 signal | | YVVELDWYPDAPGEMVVLTCDTPEEDGITW | | |
| sequence; | | TLDQSSEVLGSGKTLTIQVKEFGDAGQYTCH | | |
| p40 (23-328 | | KGGEVLSHSLLLLHKKEDGIWSTDILKDQKE | | |
| of WT); | | PKNKTFLRCEAKNYSGRFTCWWLTTISTDLT | | |
| linker | | FSVKSSRGSSDPQGVTCGAATLSAERVRGDN | | |
| (G4S)3; p35 | | KEYEYSVECQEDSACPAAEESLPIEVMVDAV | | |
| (57-253 of | | HKLKYENYTSSFFIRDIIKPDPPKNLQLKPLK | | |
| WT); linker | | NSRQVEVSWEYPDTWSTPHSYFSLTFCVQV | | |
| (GGSG); | | QGKSKREKKDRVFTDKTSATVICRKNASISV | | |
| FKBP | | RAQDRYYSSSWSEWASVPCSGGGGSGGGGS | | |
| (M1del, | | GGGGSRNLPVATPDPGMFPCLHHSQNLLRA | | |
| E32G, | | VSNMLQKARQTLEFYPCTSEEIDHEDITKDK | | |
| F37V, | | TSTVEACLPLELTKNESCLNSRETSFITNGSC | | |
| R72G, | | LASRKTSFMMALCLSSIYEDLKMYQVEFKT | | |
| K106E); | | MNAKLLMDPKRQIFLDQNMLAVIDELMQAL | | |
| stop) (OT— | | NFNSETVPQKSSLEEPDFYKTKIKLCILLHAF | | |
| IL12-026) | | RIRAVTIDRVMSYLNASGGSGGVQVETISPG | | |
| | | DGRTFPKRGQTCVVHYTGMLGDGKKVDSS | | |
| | | RDRNKPFKFMLGKQEVIRGWEEGVAQMSV | | |
| | | GQGAKLTISPDYAYGATGHPGIIPPHATLVFD | | |
| | | VELLELE* | | |
| OT-001444 | EF1a | MCHQQLVISWFSLVFLASPLVAIWELKKDVY | 842 | 847 |
| (p40 signal | | VVELDWYPDAPGEMVVLTCDTPEEDGITWT | | |
| sequence; | | LDQSSEVLGSGKTLTIQVKEFGDAGQYTCHK | | |
| p40 (23-328 | | GGEVLSHSLLLLHKKEDGIWSTDILKDQKEP | | |
| of WT); | | KNKTFLRCEAKNYSGRFTCWWLTTISTDLTF | | |
| linker | | SVKSSRGSSDPQGVTCGAATLSAERVRGDN | | |
| (G4S)3; p35 | | KEYEYSVECQEDSACPAAEESLPIEVMVDAV | | |
| (57-253 of | | HKLKYENYTSSFFIRDIIKPDPPKNLQLKPLK | | |
| WT); | | NSRQVEVSWEYPDTWSTPHSYFSLTFCVQV | | |
| BamH1 Site | | QGKSKREKKDRVFTDKTSATVICRKNASISV | | |
| (GS); | | RAQDRYYSSSWSEWASVPCSGGGGSGGGGS | | |
| hDHFR | | GGGGSRNLPVATPDPGMFPCLHHSQNLLRA | | |
| (M1del, | | VSNMLQKARQTLEFYPCTSEEIDHEDITKDK | | |
| I17V); stop) | | TSTVEACLPLELTKNESCLNSRETSFITNGSCL | | |
| (OT-IL12— | | ASRKTSFMMALCLSSIYEDLKMYQVEFKTM | | |
| 078) | | NAKLLMDPKRQIFLDQNMLAVIDELMQALN | | |
| | | FNSETVPQKSSLEEPDFYKTKIKLCILLHAFRI | | |
| | | RAVTIDRVMSYLNASGSVGSLNCIVAVSQN | | |
| | | MGVGKNGDLPWPPLRNEFRYFQRMTTTSSV | | |
| | | EGKQNLVIMGKKTWFSIPEKNRPLKGRINLV | | |
| | | LSRELKEPPQGAHFLSRSLDDALKLTEQPELA | | |
| | | NKVDMVWIVGGSSVYKEAMNHPGHLKLFV | | |
| | | TRIMQDFESDTFFPEIDLEKYKLLPEYPGVLS | | |
| | | DVQEEKGIKYKFEVYEKND* | | |
| OT-001445 | EF1a | MCHQQLVISWFSLVFLASPLVAIWELKKDVY | 844 | 848 |
| (p40 signal | | VVELDWYPDAPGEMVVLTCDTPEEDGITWT | | |
| sequence; | | LDQSSEVLGSGKTLTIQVKEFGDAGQYTCHK | | |
| p40 (23-328 | | GGEVLSHSLLLLHKKEDGIWSTDILKDQKEP | | |
| of WT); | | KNKTFLRCEAKNYSGRFTCWWLTTISTDLTF | | |
| linker | | SVKSSRGSSDPQGVTCGAATLSAERVRGDN | | |
| (G4S)3; p35 | | KEYEYSVECQEDSACPAAEESLPIEVMVDAV | | |
| (57-253 of | | HKLKYENYTSSFFIRDIIKPDPPKNLQLKPLK | | |
| WT); Gly; | | NSRQVEVSWEYPDTWSTPHSYFSLTFCVQV | | |
| Modified | | QGKSKREKKDRVFTDKTSATVICRKNASISV | | |
| furin | | RAQDRYYSSSWSEWASVPCSGGGGSGGGGS | | |
| (ESRRVRR | | GGGGSRNLPVATPDPGMFPCLHHSQNLLRA | | |
| NKRSK); | | VSNMLQKARQTLEFYPCTSEEIDHEDITKDK | | |
| BamH1 Site | | TSTVEACLPLELTKNESCLNSRETSFITNGSCL | | |
| (GS); | | ASRKTSFMMALCLSSIYEDLKMYQVEFKTM | | |
| hDHFR | | NAKLLMDPKRQIFLDQNMLAVIDELMQALN | | |
| (M1del, | | FNSETVPQKSSLEEPDFYKTKIKLCILLHAF | | |
| I17V); stop) | | RIRAVTIDRVMSYLNASGESRRVRRNKRSKG | | |
| (OT-IL12— | | SVGSLNCIVAVSQNMGVGKNGDLPWPPLRNE | | |
| 079) | | FRYFQRMTTTSSVEGKQNLVIMGKKTWFSIP | | |
| | | EKNRPLKGRINLVLSRELKEPPQGAHFLSRSL | | |
| | | DDALKLTEQPELANKVDMVWIVGGSSVYKE | | |
| | | AMNHPGHLKLFVTRIMQDFESDTFFPEIDLE | | |
| | | KYKLLPEYPGVLSDVQEEKGIKYKFEVYEKN | | |
| | | D* | | |
| OT-001446 | EF1a | MCHQQLVISWFSLVFLASPLVAIWELKKDVY | 844 | 849 |
| (p40 signal | | VVELDWYPDAPGEMVVLTCDTPEEDGITWT | | |
| sequence; | | LDQSSEVLGSGKTLTIQVKEFGDAGQYTCHK | | |
| p40 (23-328 | | GGEVLSHSLLLLHKKEDGIWSTDILKDQKEP | | |
| of WT); | | KNKTFLRCEAKNYSGRFTCWWLTTISTDLTF | | |
| linker | | SVKSSRGSSDPQGVTCGAATLSAERVRGDN | | |
| (G4S)3; p35 | | KEYEYSVECQEDSACPAAEESLPIEVMVDAV | | |
| (57-253 of | | HKLKYENYTSSFFIRDIIKPDPPKNLQLKPLK | | |
| WT); | | NSRQVEVSWEYPDTWSTPHSYFSLTFCVQV | | |
| BamH1 Site | | QGKSKREKKDRVFTDKTSATVICRKNASISV | | |
| (GS); | | RAQDRYYSSSWSEWASVPCSGGGGSGGGGS | | |
| hDHFR | | GGGGSRNLPVATPDPGMFPCLHHSQNLLRA | | |
| (M1del, | | VSNMLQKARQTLEFYPCTSEEIDHEDITKDK | | |
| Y122I); | | TSTVEACLPLELTKNESCLNSRETSFITNGSC | | |
| stop) (OT— | | LASRKTSFMMALCLSSIYEDLKMYQVEFKTM | | |
| IL12-082— | | NAKLLMDPKRQIFLDQNMLAVIDELMQALNF | | |
| 002 or OT— | | NSETVPQKSSLEEPDFYKTKIKLCILLHAFR | | |
| IL12-082) | | IRAVTIDRVMSYLNASGSVGSLNCIVAVSQN | | |
| | | MGIGKNGDLPWPPLRNEFRYFQRMTTTSSVE | | |
| | | GKQNLVIMGKKTWFSIPEKNRPLKGRINLVL | | |
| | | SRELKEPPQGAHFLSRSLDDALKLTEQPELA | | |
| | | NKVDMVWIVGGSSVIKEAMNHPGHLKLFVT | | |
| | | RIMQDFESDTFFPEIDLEKYKLLPEYPGVLSD | | |
| | | VQEEKGIKYKFEVYEKND* | | |
| OT-001447 | EF1a | MCHQQLVISWFSLVFLASPLVAIWELKKDVY | 845 | 848 |
| (p40 signal | | VVELDWYPDAPGEMVVLTCDTPEEDGITWT | | |
| sequence; | | LDQSSEVLGSGKTLTIQVKEFGDAGQYTCHK | | |
| p40 (23-328 | | GGEVLSHSLLLLHKKEDGIWSTDILKDQKEP | | |
| of WT); | | KNKTFLRCEAKNYSGRFTCWWLTTISTDLTF | | |
| linker | | SVKSSRGSSDPQGVTCGAATLSAERVRGDN | | |
| (G4S)3; p35 | | KEYEYSVECQEDSACPAAEESLPIEVMVDAV | | |
| (57-253 of | | HKLKYENYTSSFFIRDIIKPDPPKNLQLKPLK | | |
| WT); Gly; | | NSRQVEVSWEYPDTWSTPHSYFSLTFCVQV | | |
| Modified | | QGKSKREKKDRVFTDKTSATVICRKNASISV | | |
| furin | | RAQDRYYSSSWSEWASVPCSGGGGSGGGGS | | |
| (ESRRVRR | | GGGGSRNLPVATPDPGMFPCLHHSQNLLRA | | |
| NKRSK); | | VSNMLQKARQTLEFYPCTSEEIDHEDITKDK | | |
| BamH1 Site | | TSTVEACLPLELTKNESCLNSRETSFITNGSCL | | |
| (GS); | | ASRKTSFMMALCLSSIYEDLKMYQVEFKTM | | |
| hDHFR | | NAKLLMDPKRQIFLDQNMLAVIDELMQALN | | |
| (M1del, | | FNSETVPQKSSLEEPDFYKTKIKLCILLHAFRI | | |
| Y122I); | | RAVTIDRVMSYLNASGESRRVRRNKRSKGS | | |
| stop) (OT— | | VGSLNCIVAVSQNMGIGKNGDLPWPPLRNEF | | |
| IL12-083— | | RYFQRMTTTSSVEGKQNLVIMGKKTWFSIPE | | |
| 002 or OT— | | KNRPLKGRINLVLSRELKEPPQGAHFLSRSLD | | |
| IL12-083) | | DALKLTEQPELANKVDMVWIVGGSSVIKEA | | |
| | | MNHPGHLKLFVTRIMQDFESDTFFPEIDLEK | | |
| | | YKLLPEYPGVLSDVQEEKGIKYKFEVYEKND | | |
| | | * | | |
| OT-001442 | EF1a | MCHQQLVISWFSLVFLASPLVAIWELKKDVY | 846 | 851 |
| (p40 signal | | VVELDWYPDAPGEMVVLTCDTPEEDGITWT | | |
| sequence; | | LDQSSEVLGSGKTLTIQVKEFGDAGQYTCHK | | |
| p40 (23-328 | | GGEVLSHSLLLLHKKEDGIWSTDILKDQKEP | | |
| of WT); | | KNKTFLRCEAKNYSGRFTCWWLTTISTDLTF | | |
| linker | | SVKSSRGSSDPQGVTCGAATLSAERVRGDN | | |
| (G4S)3; p35 | | KEYEYSVECQEDSACPAAEESLPIEVMVDAV | | |
| (57-253 of | | HKLKYENYTSSFFIRDIIKPDPPKNLQLKPLK | | |
| WT); | | NSRQVEVSWEYPDTWSTPHSYFSLTFCVQV | | |
| BamH1 Site | | QGKSKREKKDRVFTDKTSATVICRKNASISV | | |
| (GS); stop) | | RAQDRYYSSSWSEWASVPCSGGGGSGGGGS | | |
| (OT-IL12— | | GGGGSRNLPVATPDPGMFPCLHHSQNLLRA | | |
| 096-002 or | | VSNMLQKARQTLEFYPCTSEEIDHEDITKDK | | |
| OT-IL12— | | TSTVEACLPLELTKNESCLNSRETSFITNGSCL | | |
| 096) | | ASRKTSFMMALCLSSIYEDLKMYQVEFKTM | | |
| | | NAKLLMDPKRQIFLDQNMLAVIDELMQALN | | |
| | | FNSETVPQKSSLEEPDFYKTKIKLCILLHAFRI | | |
| | | RAVTIDRVMSYLNASGS* | | |

[0183] In some embodiments, DD regulated IL12 compositions of the invention may be utilized to minimize the cytotoxicities associated with systemic IL12 administration. Treatment with IL12 has been associated with systemic flu-like symptoms (fever, chills, fatigue, arthromyalgia, headache), toxic effects on the bone marrow, and liver. Hematologic toxicity observed most commonly included neutropenia and thrombocytopenia; hepatic dysfunction manifested in transient (dose dependent) increase in transaminases, hyperbilirubinemia and hypoalbuminemia. In some instances, toxicity is also associated with inflammation of the mucus membranes (oral mucositis, stomatitis or colitis). These toxic effects of IL12 were related to the secondary production of IFNgamma, TNFalpha, and chemokines such as IP10, and MIG. In certain aspects of the invention, DD regulated IL12 may be utilized to prevent the toxic effects associated with elevated production of secondary messengers. In some embodiments, DD regulated Flexi IL12 constructs may be used to improve the efficacy of the CARs, especially in solid tumor settings, by providing a controlled local signal for tumor microenvironment remodeling and epitope spreading. DD regulation also provides rapid, dose dependent, and local production of Flexi IL12.

[0184] In some embodiments, the IL12 expression may be tuned to generate a Th1 response in vivo. CD4+T cells differentiate into effector Th1 cells that are involved in Th1 response. Th1 cells produce IL2 and interferon gamma, which are involved in cell mediated responses. In some embodiments, compositions of the invention may be tuned to achieve low basal expression in the absence of the stimulus and IL12 levels sufficient to generate Th1 response. In some embodiments, compositions of the invention may be tuned to achieve low basal expression in the absence of stimulus and then expression is induced at least 1×, 2×, 3×, 4×, 5×, 6×, 7×, 8×, 9×, 10×, or more than 10× upon the addition of the drug.

[0185] The format of the IL12 constructs utilized as payload of the present invention may be optimized. In one embodiment, the payload of the invention may be a bicistronic IL12 containing p40 and p35 subunits separated by an internal ribosome entry site or a cleavage site such as P2A or Furin to allow independent expression of both subunits from a single vector. This results in a configuration of secreted IL12 that is more akin to the naturally occurring IL12 than the flexi IL12 construct, the payload of the invention may be the p40 subunit of the IL12. DD regulated p40 may be co-expressed with constitutive p35 construct to generate “regulatable IL12” expression. Alternatively, the DD regulated p40 may heterodimerize with the endogenous p35. p40 has been shown to stabilize p35 expression and stimulate the export of p35 (Jalah R, et al. (2013). Journal of Biol. Chem. 288, 6763-6776 (the contents of which are incorporated by reference in its entirety).

[0186] In some embodiments, modified forms of IL12 may be utilized as the payload. These modified forms of IL12 may be engineered to have shortened half-life in vivo compared to the non-modified form of especially when used in combination with tunable systems described herein.

[0187] Human flexi IL12 has a reported half-life of 5-19 hours which, when administered as a therapeutic compound, can result in systemic cytotoxicity (Car et al. (1999) The Toxicology of Interleukin-12: A Review” Toxicologic Path. 27 A, 58-63; Robertson et al. (1999) “Immunological Effects of Interleukin 12 Administered by Bolus Intravenous Injection to Patients with Cancer” Clin. Cancer Res. 5:9-16; Atkins et al. (1997)“Phase I Evaluation of Intravenous Recombinant Human Interleukin 12 in Patients with Advance Malignancies” Clin. Cancer Res. 3:409-417). The ligand inducible control of IL12 can regulate production in a dose dependent fashion, the time from cessation of ligand dosing to cessation of protein synthesis and IL12 clearance may be insufficient to prevent toxic accumulation of IL12 in plasma.

[0188] In one embodiment, the modified form of IL12 utilized as the payload may be a Topo-scIL12 which have the configuration as follows from N to C terminus (i) a first IL12 p40 domain (p40N), (ii) an optional first peptide linker, (iii) an IL12 p35 domain, (iv) an optional second peptide linker, and (v) a second IL12 p40 domain (p40C). In one embodiment, modified topo-sc-IL12 polypeptides exhibit increased susceptibility to proteolysis. Topo-sc IL12 is described in International Patent Publication No. WO2016048903; the contents of which are incorporated herein by reference in its entirety.

[0189] IL12 polypeptide may also be modified (e.g. genetically, synthetically, or recombinantly engineered) to increase susceptibility to proteinases to reduce the biologically active half-life of the IL12 complex, compared to a corresponding IL12 lacking proteinases susceptibility. Proteinase susceptible forms of IL12 are described in International Patent Publication No. WO2017062953; the contents of which are incorporated by reference in its entirety.

[0190] In some embodiments, the pharmacokinetic/pharmacodynamic measurements of IL12 in vivo may be assessed by measuring serum IL12 levels and/or downstream mediators of IL12 such as IL16, IL6 and IL10.

[0191] IL12 systemic toxicity may also be limited or tightly controlled via mechanisms involving tethering IL12 to the cell surface to limit its therapeutic efficacy to the tumor site. Membrane tethered IL12 forms have been described previously using Glycosyl phosphatidylinositol (GPI) signal peptide or using CD80 transmembrane domain (Nagarajan S, et al. (2011) J Biomed Mater Res A. 99(3):410-7; Bozeman E N, et al. (2013) Vaccine. 7; 31(20):2449-56; Wen-Yu Pan et al. (2012), Mol. Ther. 20:5, 927-937; the contents of each of which are incorporated by reference in their entirety).

[0192] In one embodiment, the payload of the invention may comprise IL15. Interleukin 15 is a potent immune stimulatory cytokine and an essential survival factor for T cells, and Natural Killer cells. Preclinical studies comparing IL2 and IL15, have shown than IL15 is associated with less toxicity than IL2. In some embodiments, the effector module of the invention may be a DD-IL15 fusion polypeptide. IL15 polypeptide may also be modified to increase its binding affinity for the IL15 receptor. For example, the asparagine may be replaced by aspartic acid at position 72 of IL15 (SEQ ID NO. 2 of US patent publication US20140134128A1; the contents of which are incorporated by reference in their entirety). In some embodiments, the IL15 constructs of the invention may be placed under the transcriptional control of the CMV promoter (SEQ ID NO. 556, 1100), an EF1a promoter (SEQ ID NO. 557, 708, 1099, 1103) or a PGK promoter (SEQ ID NO. 558, 1101, 1102). In some aspects, the DD-IL15 comprises the amino acid sequences listed in Table 7. The amino acid sequences in Table 7 may comprise a stop codon which is denoted in the table with a “*” at the end of the amino acid sequence. In Table 7, “del” means deletion and “WT” means wild-type.

TABLE 7
DD-IL15 constructs

| | | | Amino | Nucleic |
|---|---|---|---|---|
| | | | Acid | Acid SEQ |
| Description/ | | | SEQ ID | ID |
| Construct ID | Promoter | Amino Acid Sequence | NO | NO |
| IL2 signal | — | MYRMQLLSCIALSLALVTNS | 614 | 617-620 |
| sequence | | | | |
| IgE signal | — | MDWTWILFLVAAATRVHS | 630 | 637, 730, |
| sequence | | | | 731 |
| (Leader) | | | | |
| Linker | — | EFSTEF | 615 | 621-622 |
| Linker | — | GGSGG | 470 | 516-520 |
| HA Tag | — | YPYDVPDYA | 823 | 824-826 |
| BamH1 | — | GS | — | GGATCC |
| P2A Cleavable | — | GATNFSLLKQAGDVEENPGP | 725 | 726 |
| Peptide | | | | |
| mCherry (MIL) | — | LSKGEEDNMAIIKEFMRFKVHMEGSVNG | 828 | 829 |
| | | HEFEIEGEGEGRPYEGTQTAKLKVTKGG | | |
| | | PLPFAWDILSPQFMYGSKAYVKHPADIP | | |
| | | DYLKLSFPEGFKWERVMNFEDGGVVTV | | |
| | | TQDSSLQDGEFIYKVKLRGTNFPSDGPV | | |
| | | MQKKTMGWEASSERMYPEDGALKGEIK | | |
| | | QRLKLKDGGHYDAEVKTTYKAKKPVQL | | |
| | | PGAYNVNIKLDITSHNEDYTIVEQYERAE | | |
| | | GRHSTGGMDELYK | | |
| IL15 (WT) | — | MRISKPHLRSISIQCYLCLLLNSHFLTEAG | 1095 | 1096 |
| | | IHVFILGCFSAGLPKTEANWVNVISDLKK | | |
| | | IEDLIQSMHIDATLYTESDVHPSCKVTAM | | |
| | | KCFLLELQVISLESGDASIHDTVENLIILA | | |
| | | NNSLSSNGNVTESGCKECEELEEKNIKEF | | |
| | | LQSFVHIVQMFINTS | | |
| IL15 (Amino | — | NWVNVISDLKKIEDLIQSMHIDATLYTES | 616 | 624-626, |
| acid 49-162 of | | DVHPSCKVTAMKCFLLELQVISLESGDA | | 801 |
| WT) | | SIHDTVENLIILANNSLSSNGNVTESGCKE | | |
| | | CEELEEKNIKEFLQSFVHIVQMFINTS* | | |
| ecDHFR | — | ISLIAALAVDYVIGMENAMPWNLPADLA | 4 | 532, 603, |
| (M1del, R12Y, | | WFKRNTLNKPVIMGRHTWESIGRPLPGR | | 641, 527, |
| Y100I) | | KNIILSSQPGTDDRVTWVKSVDEAIAAC | | 788, 791 |
| | | GDVPEIMVIGGGRVIEQFLPKAQKLYLTH | | |
| | | IDAEVEGDTHFPDYEPDDWESVFSEFHD | | |
| | | ADAQNSHSYCFEILERR* | | |
| hDHFR | — | VGSLNCIVAVSQNMGIGKNGDLPWPPLR | 696 | 534, 535 |
| (M1del, Y122I) | | NEFRYFQRMTTTSSVEGKQNLVIMGKKT | | |
| | | WFSIPEKNRPLKGRINLVLSRELKEPPQG | | |
| | | AHFLSRSLDDALKLTEQPELANKVDMV | | |
| | | WIVGGSSVIKEAMNHPGHLKLFVTRIMQ | | |
| | | DFESDTFFPEIDLEKYKLLPEYPGVLSDV | | |
| | | QEEKGIKYKFEVYEKND | | |

[0193] A unique feature of IL15 mediated activation is the mechanism of trans-presentation in which IL15 is presented as a complex with the alpha subunit of IL15 receptor (IL15Ra) that binds to and activates membrane bound IL15 beta/gamma receptor, either on the same cell or a different cell. The IL15/IL15Ra complex is more effective in activating IL15 signaling, than IL15 by itself. Thus, in some embodiments, the effector module of the invention may include a DD-IL15/IL15Ra fusion polypeptide. In one embodiment, the payload may be IL15/IL15Ra fusion polypeptide described in US Patent Publication NO. US20160158285A1 (the contents of which are incorporated herein by reference in their entirety). The IL15 receptor alpha comprises an extracellular domain called the sushi domain which contains most of the structural elements necessary for binding to IL15. Thus, in some embodiments, payload may be the IL15/IL15Ra sushi domain fusion polypeptide described in US Patent Publication NO. US20090238791A1 (the contents of which are incorporated herein by reference in their entirety).

[0194] Regulated IL15/IL15Ra may be used to promote expansion, survival and potency of CD8T_{EM} cell populations without impacting regulatory T cells, NK cells and TIL cells.

[0195] In some embodiments, compositions of the invention may be used to tune the persistence of the immune cells. In the context of immune cells, the term persistence refers to continued or prolonged existence of the immune cells in vitro or in vivo. In some embodiments, persistence of the immune cell may be linked to the increased longevity of the immune cells. In some embodiments, immune cell persistence may be associated with increased proliferation of the immune cells. In some aspects, persistence may be associated with a change in the differentiation status of the cell. In one embodiments, the persistence of the immune cell may be achieved by using IL15-IL15Ra as the payload of the invention. Persistence of the least differentiated memory T cell, the T-memory stem cell, has been shown to be promoted by signaling induced by a membrane-bound IL-15-IL15Ra cytokine-fusion molecule. This may in turn, promote the therapeutic efficacy of CAR-based immunotherapies of patients with advanced cancer.

[0196] In some embodiments, the immunotherapeutic agent of the composition may be a cytokine. The cytokine may be an interleukin, an interferon, a tumor necrosis factor, a transforming growth factor B, a CC chemokine, a CXC chemokine, a CX3C chemokine or a growth factor.

[0197] In one aspect, the interleukin may be a whole or a portion of a IL15 and may comprise the amino acid sequence of SEQ ID NO. 1095. In one aspect, the IL15 may be modified. In some embodiments, the modifications may comprise fusing SEQ ID NO. 1095 to the whole or a portion of, a transmembrane domain. The IL15 may optionally be modified by incorporating a hinge domain.

[0198] In some embodiment, the immunotherapeutic agent of the composition may be a cytokine receptor. In one aspect, the cytokine receptor may be IL15Ra and may comprise the amino acid sequence of SEQ ID NO. 1097. In one aspect, the IL15Ra may be modified. In some embodiments, the modifications may comprise fusing SEQ ID NO. 1097 to the whole or a portion of, a transmembrane domain. The IL15Ra may optionally be modified by incorporating a hinge domain.

[0199] The present invention also provides methods for enhancing the expansion and/or survival of immune cells, comprising contacting the immune cells with the compositions of the invention, the polynucleotides of the invention, and/or the vectors of the invention.

[0200] Also provided herein, is a method for inducing an immune response in a subject, administering the compositions of the invention, the polynucleotides of the invention, and/or the immune cells of the invention to the subject.

[0201] In one embodiment, DD-IL15/IL15Ra may be utilized to enhance CD19 directed T cell therapies in B cell leukemia and lymphomas. In one aspect, IL15/IL15Ra may be used as payload of the invention to reduce the need for pre-conditioning regimens in current CAR-T treatment paradigms.

[0202] The effector modules containing DD-IL15, DD-IL15/IL15Ra and/or DD-IL15/IL15Ra sushi domain may be designed to be secreted (using e.g. IL2 signal sequence) or membrane bound (using e.g. IgE or CD8a signal sequence).

[0203] In some aspects, the DD-IL115/IL15Ra comprises the amino acid sequences provided in Table 8 and Table 9. In Table 8 and Table 9, “del” means deletion and “WT” means wild-type.

TABLE 8
DD-IL15/IL15Ra construct sequences

| | | Amino Acid | Nucleic |
|---|---|---|---|
| Description/ | | SEQ ID | Acid SEQ |
| Construct ID | Amino Acid Sequence | NO | ID NO |
| IgE leader | MDWTWILFLVAAATRVHS | 630 | 637, 730, |
| | | | 731 |
| IL15RA Leader | MAPRRARGCRTLGLPALLLLLLLRPPATRG | 732 | 733 |
| Linker (SG3- | SGGGSGGGGSGGGGSGGGGSGGGSLQ | 631 | 638,716- |
| (SG4)3SG3SLQ) | | | 720, 802 |
| Linker (SG3S) | SGGGS | 654 | 655, 670, |
| | | | 709 |
| Linker | SGGGSGGGGSGGGGSGGGGSGGGGSGGGGSGG | 721 | 723 |
| (SG3(SG4)5SG3S) | GS | | |
| Linker (SG3- | SGGGSGGGGSGGGGSGGGGS | 722 | 724 |
| (SG4)3)S | | | |
| BamH1 (Linker) | GS | - | GGTTCC, |
| | | | GGATCC |
| Linker | SG | - | AGCGGC |
| Linker | GSG | - | GGATCC |
| | | | GGA or |
| | | | GGATCC |
| | | | GGT |
| Spacer | | | 727-729, |
| | | | 800, |
| | | | TCGCGA |
| | | | ATG, |
| | | | TCGCA |
| CD8a Hinge- | TTTPAPRPPTPAPTIASQPLSLRPEACRPAAGGAV | 403 | 468 |
| Transmembrane | HTRGLDFACDIYIWAPLAGTCGVLLLSLVITLYC | | |
| Domain (TM) | | | |
| IL15 (WT) | MRISKPHLRSISIQCYLCLLLNSHFLTEAGIHVFIL | 1095 | 1096 |
| | GCFSAGLPKTEANWVNVISDLKKIEDLIQSMHID | | |
| | ATLYTESDVHPSCKVTAMKCFLLELQVISLESGD | | |
| | ASIHDTVENLIILANNSLSSNGNVTESGCKECEEL | | |
| | EEKNIKEFLQSFVHIVQMFINTS | | |
| IL15 (49-162 of | NWVNVISDLKKIEDLIQSMHIDATLYTESDVHPS | 616 | 623-626, |
| WT) | CKVTAMKCFLLELQVISLESGDASIHDTVENLIIL | | 801 |
| | ANNSLSSNGNVTESGCKECEELEEKNIKEFLQSF | | |
| | VHIVQMFINTS* | | |
| IL15Ra(WT; | MAPRRARGCRTLGLPALLLLLLLRPPATRGITCP | 1097 | 1098 |
| Uniprot ID: | PPMSVEHADIWVKSYSLYSRERYICNSGFKRKA | | |
| Q13261.1) | GTSSLTECVLNKATNVAHWTTPSLKCIRDPALV | | |
| | HQRPAPPSTVTTAGVTPQPESLSPSGKEPAASSPS | | |
| | SNNTAATTAAIVPGSQLMPSKSPSTGTTEISSHES | | |
| | SHGTPSQTTAKNWELTASASHQPPGVYPQGHSD | | |
| | TTVAISTSTVLLCGLSAVSLLACYLKSRQTPPLAS | | |
| | VEMEAMEALPVTWGTSSRDEDLENCSHHL | | |
| IL15Ra (31-267 of | ITCPPPMSVEHADIWVKSYSLYSRERYICNSGFK | 632 | 639-640, |
| WT) | RKAGTSSLTECVLNKATNVAHWTTPSLKCIRDP | | 803 |
| | ALVHQRPAPPSTVTTAGVTPQPESLSPSGKEPAA | | |
| | SSPSSNNTAATTAAIVPGSQLMPSKSPSTGTTEIS | | |
| | SHESSHGTPSQTTAKNWELTASASHQPPGVYPQG | | |
| | HSDTTVAISTSTVLLCGLSAVSLLACYLKSRQTPP | | |
| | LASVEMEAMEALPVTWGTSSRDEDLENCSHHL* | | |
| IL15Ra (31-205 of | ITCPPPMSVEHADIWVKSYSLYSRERYICNSGFK | 855 | 856 |
| WT) | RKAGTSSLTECVLNKATNVAHWTTPSLKCIRDP | | |
| | ALVHQRPAPPSTVTTAGVTPQPESLSPSGKEPAA | | |
| | SSPSSNNTAATTAAIVPGSQLMPSKSPSTGTTEISS | | |
| | HESSHGTPSQTTAKNWELTASASHQPPGVYPQG | | |
| | HSDTT | | |
| mCherry | MSKGEEDNMAIIKEFMRFKVHMEGSVNGHEFEI | 857 | 858 |
| | EGEGEGRPYEGTQTAKLKVTKGGPLPFAWDILSP | | |
| | QFMYGSKAYVKHPADIPDYLKLSFPEGFKWERV | | |
| | MNFEDGGVVTVTQDSSLQDGEFIYKVKLRGTNF | | |
| | PSDGPVMQKKTMGWEASSERMYPEDGALKGEI | | |
| | KQRLKLKDGGHYDAEVKTTYKAKKPVQLPGAY | | |
| | NVNIKLDITSHNEDYTIVEQYERAEGRHSTGGM | | |
| | DELYK* | | |
| mCherry (MIL) | LSKGEEDNMAIIKEFMRFKVHMEGSVNGHEFEIE | 828 | 829 |
| | GEGEGRPYEGTQTAKLKVTKGGPLPFAWDILSP | | |
| | QFMYGSKAYVKHPADIPDYLKLSFPEGFKWERV | | |
| | MNFEDGGVVTVTQDSSLQDGEFIYKVKLRGTNF | | |
| | PSDGPVMQKKTMGWEASSERMYPEDGALKGEI | | |
| | KQRLKLKDGGHYDAEVKTTYKAKKPVQLPGAY | | |
| | NVNIKLDITSHNEDYTIVEQYERAEGRHSTGGMD | | |
| | ELYK | | |
| HA Tag | YPYDVPDYA | 823 | 824-826 |
| Flag | DYKDDDDK | 1030 | - |
| P2A Cleavable | GATNFSLLKQAGDVEENPGP | 725 | 726 |
| Peptide | | | |
| ecDHFR (M1del, | ISLIAALAVDYVIGMENAMPWNLPADLAWFKRN | 4 | 532, 603, |
| RI2Y, Y100I) | TLNKPVIMGRHTWESIGRPLPGRKNIILSSQPGTD | | 641, 527, |
| | DRVTWVKSVDEAIAACGDVPEIMVIGGGRVIEQ | | 788, 791 |
| | FLPKAQKLYLTHIDAEVEGDTHFPDYEPDDWES | | |
| | VFSEFHDADAQNSHSYCFEILERR* | | |
| ecDHFR (M1del, | ISLIAALAVDHVIGMENAMPWNLPADLAWFKRN | 5 | 627, 842, |
| RI2H, E129K) | TLNKPVIMGRHTWESIGRPLPGRKNIILSSQPGT | | 793 |
| | DDRVTWVKSVDEAIAACGDVPEIMVIGGGRVYEQ | | |
| | FLPKAQKLYLTHIDAEVEGDTHFPDYKPDDWES | | |
| | VFSEFHDADAQNSHSYCFEILERR* | | |
| FKBP (E32G, | GVQVETISPGDGRTFPKRGQTCVVHYTGMLGDG | 7 | 528-531, |
| F37V, R72G, | KKVDSSRDRNKPFKFMLGKQEVIRGWEEGVAQ | | 794, 812, |
| K106E) | MSVGQGAKLTISPDYAYGATGHPGIIPPHATLVF | | 827 |
| | DVELLELE* | | |
| hDHFR (M1del, | VGSLNCIVAVSQNMGIGKNGDLPWPPLRNEFRY | 691 | 536, 773, |
| Y122I, A125F) | FQRMTTTSSVEGKQNLVIMGKKTWFSIPEKNRPL | | 774, 796 |
| | KGRINLVLSRELKEPPQGAHFLSRSLDDALKLTE | | |
| | QPELANKVDMVWIVGGSSVIKEFMNHPGHLKLF | | |
| | VTRIMQDFESDTFFPEIDLEKYKLLPEYPGVLS | | |
| | DVQEEKGIKYKFEVYEKND* | | |
| hDHFR (M1del, | VGSLNCIVAVSQNMGIGKNGDLPWPPLRNEFRY | 692 | 540, 775, |
| Q36F, N65F, | FFRMTTTSSVEGKQNLVIMGKKTWFSIPEKFRPL | | 776, 798 |
| Y122I) | KGRINLVLSRELKEPPQGAHFLSRSLDDALKLTE | | |
| | QPELANKVDMVWIVGGSSVIKEAMNHPGHLKL | | |
| | FVTRIMQDFESDTFFPEIDLEKYKLLPEYPGVLSD | | |
| | VQEEKGIKYKFEVYEKND | | |
| hDHFR (M1del, | VGSLNCIVAVSQNMGIGKNGDLPWPPLRNEFRY | 690 | 772 |
| K185E) | FQRMTTTSSVEGKQNLVIMGKKTWFSIPEKNRPL | | |
| | KGRINLVLSRELKEPPQGAHFLSRSLDDALKLTE | | |
| | QPELANKVDMVWIVGGSSVYKEAMNHPGHLKLF | | |
| | VTRIMQDFESDTFFPEIDLEKYKLLPEYPGVLSD | | |
| | VQEEKGIKYKFEVYEEND* | | |
| hDHFR (M1del, | VGSLNCIVAVSQNMGIGKNGDLPWPPLRNEFRY | 689 | 770-772 |
| E162G, I176F) | FQRMTTTSSVEGKQNLVIMGKKTWFSIPEKNRPL | | |
| | KGRINLVLSRELKEPPQGAHFLSRSLDDALKLTE | | |
| | QPELANKVDMVWIVGGSSVYKEAMNHPGHLKLF | | |
| | VTRIMQDFESDTFFPEIDLEKYKLLPGYPGVLSD | | |
| | VQEEKGFKYKFEVYEKND* | | |
| hDHFR (M1del, | VGSLNCIVAVSQNMGIGKNGDLPWPPLRNEFRY | 693 | 777 |
| N127Y) | FQRMTTTSSVEGKQNLVIMGKKTWFSIPEKNRPL | | |
| | KGRINLVLSRELKEPPQGAHFLSRSLDDALKLTE | | |
| | QPELANKVDMVWIVGGSSVYKEAMYHPGHLKLF | | |
| | VTRIMQDFESDTFFPEIDLEKYKLLPEYPGVLSD | | |
| | VQEEKGIKYKFEVYEKND | | |
| hDHFR (M1del, | VGSLNCIVAVSQNMGVGKNGDLPWPPLRNEFR | 695 | 779 |
| I17V) | YFQRMTTTSSVEGKQNLVIMGKKTWFSIPEKNR | | |
| | PLKGRINLVLSRELKEPPQGAHFLSRSLDDALKL | | |
| | TEQPELANKVDMVWIVGGSSVYKEAMNHPGHLK | | |
| | LFVTRIMQDFESDTFFPEIDLEKYKLLPEYPGVL | | |
| | SDVQEEKGIKYKFEVYEKND | | |
| hDHFR (M1del, | VGSLNCIVAVSQNMGVGKNGDLPWPPLRNEFR | 688 | 769 |
| I17V, Y122I) | YFQRMTTTSSVEGKQNLVIMGKKTWFSIPEKNR | | |
| | PLKGRINLVLSRELKEPPQGAHFLSRSLDDALKL | | |
| | TEQPELANKVDMVWIVGGSSVIKEAMNHPGHLK | | |
| | LFVTRIMQDFESDTFFPEIDLEKYKLLPEYPGVL | | |
| | SDVQEEKGIKYKFEVYEKND | | |
| hDHFR (M1del, | VGSLNCIVAVSQNMGIGKNGDLPWPPLRNEFRY | 694 | 778 |
| H131R, E144G) | FQRMTTTSSVEGKQNLVIMGKKTWFSIPEKNRPL | | |
| | KGRINLVLSRELKEPPQGAHFLSRSLDDALKLTE | | |
| | QPELANKVDMVWIVGGSSVYKEAMNHPGRLKLF | | |
| | VTRIMQDFGSDTFFPEIDLEKYKLLPEYPGVLSD | | |
| | VQEEKGIKYKFEVYEKND | | |

TABLE 9
DD-IL15/IL15Ra constructs

| | | | Amino | Nucleic |
|---|---|---|---|---|
| | | | Acid | Acid |
| | | | SEQ ID | SEQ ID |
| Description | Promoter | Amino acid sequences | NO | NO |
| OT-001111 and OT- | EF1a | MDWTWILFLVAAATRVHSNWVNVISD | 636 | 646 |
| 001471 (IgE signal | | LKKIEDLIQSMHIDATLYTESDVHPSCK | | |
| sequence; IL15 (49- | | VTAMKCFLLELQVISLESGDASIHDTVE | | |
| 162 of WT); linker | | NLIILANNSLSSNGNVTESGCKECEELE | | |
| (SG3-(SG4)3-SG3- | | EKNIKEFLQSFVHIVQMFINTSSGGGSG | | |
| SLQ); IL15Ra(31- | | GGGSGGGGSGGGGSGGGSLQITCPPPMS | | |
| 267 of WT); Linker | | VEHADIWVKSYSLYSRERYICNSGFKR | | |
| (SG); ecDHFR | | KAGTSSLTECVLNKATNVAHWTTPSLK | | |
| (M1del, R12Y, | | CIRDPALVHQRPAPPSTVTTAGVTPQPE | | |
| 1001); stop) (OT- | | SLSPSGKEPAASSPSSNNTAATTAAIVPG | | |
| IL15-009 and OT- | | SQLMPSKSPSTGTTEISSHESSHGTPSQT | | |
| IL15-073) | | TAKNWELTASASHQPPGVYPQGHSDTT | | |
| | | VAISTSTVLLCGLSAVSLLACYLKSRQT | | |
| | | PPLASVEMEAMEALPVTWGTSSRDEDL | | |
| | | ENCSHHLSGISLIAALAVDYVIGMENA | | |
| | | MPWNLPADLAWFKRNTLNKPVIMGRH | | |
| | | TWESIGRPLPGRKNIILSSQPGTDDRVT | | |
| | | WVKSVDEAIAACGDVPEIMVIGGGRVI | | |
| | | EQFLPKAQKLYLTHIDAEVEGDTHFPD | | |
| | | YEPDDWESVFSEFHDADAQNSHSYCFEI | | |
| | | LERR* | | |
| OT-001418 and OT- | EF1a | MDWTWILFLVAAATRVHSNWVNVISD | 635 | 645 |
| 001422 (IgE signal | | LKKIEDLIQSMHIDATLYTESDVHPSCK | | |
| sequence; IL15 (49- | | VTAMKCFLLELQVISLESGDASIHDTVE | | |
| 162 of WT); Linker | | NLIILANNSLSSNGNVTESGCKECEELEE | | |
| (SG3-(SG4)3-SG3- | | KNIKEFLQSFVHIVQMFINTSSGGGSGG | | |
| SLQ); IL15Ra(31- | | GGSGGGGSGGGGSGGGSLQITCPPPMS | | |
| 267 of WT); stop) | | VEHADIWVKSYSLYSRERYICNSGFKR | | |
| (OT-IL15-064 and | | KAGTSSLTECVLNKATNVAHWTTPSLK | | |
| OT-IL15-071) | | CIRDPALVHQRPAPPSTVTTAGVTPQPE | | |
| | | SLSPSGKEPAASSPSSNNTAATTAAIVPG | | |
| | | SQLMPSKSPSTGTTEISSHESSHGTPSQT | | |
| | | TAKNWELTASASHQPPGVYPQGHSDTT | | |
| | | VAISTSTVLLCGLSAVSLLACYLKSRQT | | |
| | | PPLASVEMEAMEALPVTWGTSSRDEDL | | |
| | | ENCSHHL* | | |

[0204] In some embodiments, payloads of the present invention may comprise inhibitory molecules that block inhibitory cytokines. The inhibitors may be blocking antibodies specific to an inhibitory cytokine, and antagonists against an inhibitory cytokine, or the like.

[0205] In some aspects, payloads of the present invention may comprise an inhibitor of a secondary cytokine IL35. IL35 belongs to the interleukin-12 (IL12) cytokine family, and is a heterodimer composed of the IL27 β chain Ebi3 and the IL12 achain p35. Secretion of bioactive IL35 has been described only in forkhead box protein 3 (Foxp3)⁺ regulatory T cells (Tregs) (resting and activated Tregs). Unlike other membranes in the family, IL35 appears to function solely in an anti-inflammatory fashion by inhibiting effector T cell proliferation and perhaps other parameters (Collison et al., Nature, 2007, 450(7169): 566-569).

[0206] In some embodiments, payloads of the present invention may comprise fusion proteins wherein a cytokine, chemokine and/or other soluble factor may be fused to other biological molecules such as antibodies and or ligands for a receptor. Such fusion molecules may increase the half-life of the cytokines, reduce systemic toxicity, and increase local concentration of the cytokines at the tumor site. Fusion proteins containing two or more cytokines, chemokines and or other soluble factors may be utilized to obtain synergistic therapeutic benefits.

### Safety Switch

[0207] In some embodiments, payloads of the present invention may comprise SRE regulated safety switches that can eliminate adoptively transferred cells in the case of severe toxicity, thereby mitigating the adverse effects of T cell therapy. Adoptively transferred T cells in immunotherapy may attack normal cells in response to normal tissue expression of TAA. Even on-tumor target activity of adoptively transferred T cells can result in toxicities such as tumor lysis syndrome, cytokine release syndrome and the related macrophage activation syndrome. Safety switches may be utilized to eliminate inappropriately activated adoptively transferred cells by induction of apoptosis or by immunosurveillance.

### Regulatory Switch

[0208] The utility of adoptive cell therapy (ACT) has been limited by the high incidence of graft versus host disease (GVHD). GVHD occurs when adoptively transferred T cells elicit an immune response resulting in host tissue damage. Recognition of host antigens by the graft cells triggers a proinflammatory cytokine storm cascade that signifies acute GVHD. GVHD is characterized as an imbalance between the effector and the regulatory arms of the immune system. In some embodiments, the payloads of the present invention may be used as regulatory switches. As used herein “regulatory switch” refers proteins, which when expressed in target cells increase tolerance to the graft by enhancing the regulatory arm of the immune system.

### Antigen

[0209] As used herein, any molecule capable of being recognized by one or more constituents of the immune system is called an “antigen.” In some embodiments, the effector modules described herein may comprise antigen. Antigens, as described herein, may be used as the SRE and/or as the payloads of the invention. Antigens of the invention may be whole protein, a truncated protein, a fragment of a protein or a peptide. Antigens may be naturally occurring, genetically engineered variants of the protein, or may be codon optimized for expression in a particular mammalian subject or host. Further, the antigens of the present invention, may include modifications, such as deletions, additions and substitutions, generally conservative in nature, to the naturally occurring sequence, so long as the protein maintains its ability to elicit an immunological response. The modifications may be intentional, as through site directed mutagenesis, or may be accidental such as through mutations in the hosts which produce the antigens. Antigens of the present invention may also be codon optimized to improve their expression or immunogenicity in the host.

[0210] Antigens may comprise one or more epitopes, which refers to the portion of the antigen that is recognized by the immune systems, specifically, the antibodies, B cells or T cells. Normally, an epitope will include between about 7 and 15 amino acids, such as, 9, 10, 12 or 15 amino acids. The term “antigen” denotes both subunit antigens, (i.e., antigens which are separate and discrete from a whole organism with which the antigen is associated in nature). Antibodies such as anti-idiotype antibodies, or fragments thereof, and synthetic peptide mimotopes, that is synthetic peptides which can mimic an antigen or antigenic determinant, are also captured under the definition of antigen as used herein.

[0211] In some embodiments, the antigens are recognized by the innate immune system. In such instances, the antigens are the pathogen associated molecular patterns recognized by the pattern recognition receptors expressed on macrophages, dendritic cells and NK cells. NK cells express an array of additional sets of receptors that recognize unconventional antigens. In some embodiments, the antigens are recognized by the adaptive immune system, the B lymphocyte-expressed immunoglobulin and T lymphocyte expressed T cell receptor recognize either specific conformation on the antigen or the amino acid sequence in the peptide respectively.

[0212] In one embodiment, the antigen may be a tolerogen. Antigens, which induce tolerogenic or allergic responses are called tolerogens. In some embodiments, antigens that do not elicit immune responses may be useful in the present invention. In other embodiments, antigens that induce or elicit an immune response may be preferred, and such antigens are referred to as immunogens.

[0213] In some embodiments, the antigens of the present invention may be incomplete antigens, which are also referred to as hapten. Haptens referred to molecules that can interact with components of the immune system, but do not elicit an immune response. The haptens may be combined with a carrier to prepare a complete antigen.

[0214] Antigens useful in the present invention may be either exogenous antigens or endogenous antigens. Exogenous antigens refer to the antigens that enter the body by inhalation, ingestion or injection. Such antigens are taken up by the antigen presenting cells (APCs) and degraded into peptides. APCs then present such antigens to CD4+ helper T cells using Class II MHC molecules. Endogenous antigens as used herein refers to antigens that are produced within the cell as a result of normal cellular metabolism, or an infection. Such antigens are presented on the cell surface using MHC type I molecules to CD8+ Cytotoxic T cells.

[0215] Antigens of the present invention may also be classified based on the source of the antigen. In some embodiments, the antigen of the present invention may be a xenoantigen, wherein the antigen is derived from a different species e.g. bacteria or viruses; an alloantigen, wherein the antigen is derived from a different individual of the same species e.g. a blood group antigen; an autoantigen, wherein the antigen is derived from the same individual e.g. tumor antigen; or a heterophile antigen, wherein the antigen is common and shared by different species.

[0216] In some embodiments, antigens of the present invention may also be selected based on their ability to induce T cell responses. T cell dependent (TD) antigen or a T cell independent (TI) antigen. TD antigens are structurally complex antigens that require T cells to generate an immune response. They are immunogenic over a wide dose range and do not cause tolerance.

[0217] Such antigens require processing by the APCs and are capable of producing immunologic memory. In contrast, TI antigens of the present invention are able to directly stimulate the B cells to produce antibodies without the participation of T cells. These antigens are structurally simple, and are composed of a limiting number of repeating epitopes. TI antigens do not induce tolerance, are less immunogenic and do not produce immunological memory.

[0218] In some embodiments, the antigens of the present invention may be derived from a specific subcellular location. In some embodiments, sub cellular location from which the antigen is derived may be the plasma membrane, the cell surface, the nucleus, the cytosol, the lysosome, the endosome, the mitochondria, the peroxisome, the Golgi body, the endoplasmic reticulum or any other organelle within the cell. In some embodiments, the cell may be a eukaryotic or a prokaryotic cell.

[0219] Antigens of the present invention may be infectious disease antigens, which herein refers to antigens associated with infectious diseases causing agents or microorganisms. In some embodiments, the antigen is an infectious disease antigen associated with an infectious disease. In some embodiments, the antigen is a viral antigen derived from a virus (e.g., and thereby expressing one or more viral antigens) and/or virus-like particle; or a bacterial antigen derived from a bacterium; a protozoan antigen derived from a protozoan; a prion antigen derived from a prion particle; or a fungal antigen derived from a fungus.

[0220] In some embodiments, antigen size may be used to identify antigens useful in the present invention. In general, antigens larger than 5000 Da are considered to be more immunogenic than antigens that are smaller than 5000 Da. In some embodiments, antigens, that are larger than 5000 Da may be preferred, such as 6000 Da, 7000 Da, 8000 Da, 9000 Da, 10,000 Da and larger. In some embodiments, antigens that are smaller than 5000 Da may be preferred to induce a weak immune response or no immune response.

[0221] In some embodiments, antigens of the present invention are preferably macromolecules. Such molecules have been shown to be more immunogenic than micromolecules. In some embodiments, the SREs and/or payloads of the invention may be less immunogenic antigens such polypeptides, glycoproteins, nucleic acids, and lipids.

[0222] In some embodiments, antigens of the present invention, may be classified based on the tissues from which the antigen originates. Such antigens may be a nervous tissue antigen, wherein the antigen is specific to the neurological tissue such as the brain, spinal cord, the central nervous system, the peripheral nervous system, including the sympathetic and parasympathetic nervous system. Such antigens may also originate from neuronal cell types such as Schwann cells, the axon, the motor or the ganglioside neuron, the glial cells, the astrocytes, progenitor cells, oligodendrocytes.

[0223] In some embodiments, the antigen is a connective tissue antigen, implying that the antigen is expressed by cells that bind other cells, and organs of the body together. Connective tissue antigens may be derived from loose connective tissues such as areolar connective tissue, adipose tissue, reticular tissue; dense connective tissue such as dense regular connective tissue or dense irregular connective tissue; or special connective tissue such as cartilage, bone and blood.

[0224] In other embodiments, the antigen is a muscle antigen. Such muscle antigens may be derived from skeletal (voluntary) muscle tissue, smooth muscle tissue and/or cardiac muscle tissue.

[0225] In one embodiment, the tissue antigen of the present invention may be an epithelium antigen derived from the epithelium that covers the exterior surface of the body and lines the internal cavities and passageways as well as forms certain glands. Antigens of the present invention may be derived from cuboidal epithelium, squamous epithelium and/or columnar epithelium.

[0226] In some embodiments, SREs and/or payloads of the present invention may be tumor specific antigens (TSAs), tumor associated antigens (TAAs). The antigen can be expressed as a peptide or as an intact protein or portion thereof. The intact protein or a portion thereof can be native or mutagenized. Antigens associated with cancers or virus-induced cancers as described herein are well-known in the art. Such a TSA or TAA may be previously associated with a cancer or may be identified by any method known in the art.

[0227] A tumor associated antigen (TAA) may be an overexpressed or accumulated antigen that is expressed by both normal and neoplastic tissue, with the level of expression highly elevated in cancer tissues. Numerous proteins (e.g. oncogenes) are up-regulated in tumor tissues, including but not limited to adipophilin, AIM-2, ALDH1A1, BCLX(L), BING-4, CALCA, CD45, CD274, CPSF, cyclin D1, DKK1, ENAH, epCAM, ephA3, EZH2, FGFS, G250, HER-2/neu, HLA-DOB, Hepsin, IDO1, IGFB3, IL13Ralpha2, Intestinal carboxyl esterase, kallikrein 4, KIF20A, lengsin, M-CSF, MCSP, mdm-2, Meloe, Midkine, MMP-2, MMP-7, MUC-1, MUCSAC, p53, Pax5, PBF, PRAME, PSMA, RAGE-1, RGSS, RhoC, RNF43, RU2A5, SECERNIN 1, SOX10, STEAP1, survivin, Telomerase, TPBG, VEGF, and WT1.

[0228] A TAA may be a cancer-testis antigen that is expressed only by cancer cells and adult reproductive tissues such as testis and placenta, including, but limited to antigens from BAGE family, CAGE family, HAGE family, GAGE family, MAGE family (e.g., MAGE-A1, MAGE-A2, MAGE-A3, MAGE-A6 and MAGE-A13), SAGE family, XAGE family, MCAK, NA88-A (cancer/testis antigen 88), PSAD1, SSX-2, and SLLP-1.

[0229] A TAA may be a lineage restricted antigen that is expressed largely by a single cancer histotype, such as Melan-A/MART-1, Gp100/pme117, Tyrosinase, TRP-1/-2, P. polypeptide, MC1R in melanoma; and prostate specific antigen (PSA) in prostate cancer.

[0230] A TAA may be an oncoviral antigen that is encoded by tumorigenic transforming viruses (also called oncogenic viruses). Oncogenic viruses, when they infect host cells, can insert their own DNA (or RNA) into that of the host cells. When the viral DNA or RNA affects the host cell's genes, it can push the cell toward becoming cancer. Oncogenic viruses include, but are not limited to, RNA viruses, and DNA viruses. Some examples of commonly known oncoviruses include human papilloma viruses (HPVs) which are main causes of cervical cancer, Epstein-Barr virus (EBV) which may cause nasopharyngeal cancer, certain types of fast-growing lymphomas (e.g., Burkitt lymphoma) and stomach cancer, hepatitis B, C and D viruses (HBV, HCV and HDV) in hepatocellular carcinoma (HCC), human immunodeficiency virus (HIV) which increases the risk of getting many types of cancer (e.g., liver cancer, anal cancer and Hodgkin cancer), Kaposi sarcoma herpes virus (KSHV; also known as human herpes virus 8 (HHV8)) which is linked to lymphoma, human T-lymphotrophic virus (HTLV-1) and merkel cell polymavirus (MCV). A viral antigen can be any defined antigen of a virus that is associated with a cancer in a human. For example, antigens from EBV may include but are not limited to, Epstein-Barr nuclear antigen-1 (EBNA1), latent membrane protein 1 (LMP1), or latent membrane protein 2 (LMP2).

[0231] A TAA may be an idiotypic antigen that is generated from highly polymorphic genes where a tumor cell expresses a specific “clonotype”, i.e., as in B cell, T cell lymphoma/leukemia resulting from clonal aberrancies, such as Immunoglobulin and T cell receptors (TCRs). Idiotypic antigens are a class of non-pathogen-associated neoantigens. For example, the malignant B cells express rearranged and multiply mutated surface immunoglobulins (Ig). Tumor specific idiotypes (e.g., immunoglobulin idiotypes) are regarded as particularly attractive tumor-specific antigens that can be successfully targeted by immunotherapy (e.g., Alejandro et al., Front Oncol., 2012, 2: 159).

### HLA Antigens

[0232] Human leukocyte antigens (HLA) are antigens expressed on all cell types of a subject and are of particular significance in the context of transplantation, wherein the transplantation recipient's immune system recognizes the HLA antigens of the donor and attacks the donor tissue causing transplant rejection. HLA antigens may either be class I or class II.

[0233] In some embodiments, antigens of the present invention may be HLA class I molecule consists of a 45-kDa glycoprotein (heavy chain) non-covalently associated with a 12-kDa polypeptide, β2-microglobulin β2m). Association of β2m with newly synthesized class I heavy chains is required in order for the HLA molecule to transport and present the peptide (Krangel et al., Cell 18: 979, 1979). However, β2m free class I heavy chains were identified on activated T lymphocytes (Schnabl et al., J. Exp. Med. 171:1431, 1990) and other cell surfaces (Bix & Raulet, J. Exp. Med. 176(3) 829-34, 1992). Properly conformed β2m free class I heavy chains were identified on the cells and were believed to have functional importance. β2m can be dissociated from a HLA class I complex on a cell surface by acid treatment (Sugawara et al., J. Immunol. Methods, 100(1-2):83-90, 1987). β2m can also be dissociated from HLA Class I complex coated on microbeads using the similar method of low pH treatment. (Pei et al. Visuals Clinical Histocompatability Workshop 2000, 9-10). Those β2m-free HLA heavy chains are referred to as “denatured antigens.”

### Immune Signaling

[0234] Treatment with immunotherapeutic agents may induce immune cell signaling, leading to the activation of cell-type specific immune activities, ultimately resulting in an immune response. In some embodiments, payloads of the present invention may be immune signaling biomolecules used to achieve exogenous control of signaling pathways.

[0235] In some embodiments, payloads of the present invention may be one or more coat proteins of the viruses, inserted transgenes, other factors that can increase intratumoral virus replication and the combinations.

[0236] In some instance, two or more oncolytic viruses may also be used as payload within the same SRE or in two or more SREs to achieve synergistic killing of target cancer cells.

### Additional Effector Module Features

[0237] The effector module of the present invention may further comprise a signal sequence which regulates the distribution of the payload of interest, a cleavage and/or processing feature which facilitate cleavage of the payload from the effector module construct, a targeting and/or penetrating signal which can regulate the cellular localization of the effector module, a tag, and/or one or more linker sequences which link different components of the effector module.

### Signal Sequences

[0238] In addition to the SRE (e.g., DD) and payload region, effector modules of the invention may further comprise one or more signal sequences. Signal sequences (sometimes referred to as signal peptides, targeting signals, target peptides, localization sequences, transit peptides, leader sequences or leader peptides) direct proteins (e.g., the effector module of the present invention) to their designated cellular and/or extracellular locations. Protein signal sequences play a central role in the targeting and translocation of nearly all secreted proteins and many integral membrane proteins.

[0239] A signal sequence is a short (5-30 amino acids long) peptide present at the N terminus of the majority of newly synthesized proteins that are destined towards a particular location. Signal sequences can be recognized by signal recognition particles (SRPs) and cleaved using type I and type II signal peptide peptidases. Signal sequences derived from human proteins can be incorporated as a regulatory module of the effector module to direct the effector module to a particular cellular and/or extracellular location. These signal sequences are experimentally verified and can be cleaved (Zhang et al., Protein Sci. 2004, 13:2819-2824).

[0240] In some embodiments, a signal sequence may be, although not necessarily, located at the N terminus or C terminus of the effector module, and may be, although not necessarily, cleaved off the desired effector module to yield a “mature” payload, i.e., an immunotherapeutic agent as discussed herein.

[0241] In some embodiments, the signal sequence used herein may exclude the methionine at the position 1 of amino acid sequence of the signal sequence. This may be referred to as an M1del mutation.

[0242] In some examples, a signal sequence may be a secreted signal sequence derived from a naturally secreted protein, and its variant thereof. In some instances, the secreted signal sequences may be cytokine signal sequences such as, but not limited to, IL2 signal sequence comprising amino acid of SEQ ID NO. 614, encoded by the nucleotide of SEQ ID NO. 617-620 and/or p40 signal sequence comprising the amino acid sequence of SEQ ID NO. 559, encoded by the nucleotide of SEQ ID NO. 567-575.

[0243] In some instances, signal sequences directing the payload of interest to the surface membrane of the target cell may be used. Expression of the payload on the surface of the target cell may be useful to limit the diffusion of the payload to non-target in vivo environments, thereby potentially improving the safety profile of the payloads. Additionally, the membrane presentation of the payload may allow for physiologically and qualitative signaling as well as stabilization and recycling of the payload for a longer half-life. Membrane sequences may be the endogenous signal sequence of the N terminal component of the payload of interest. Optionally, it may be desirable to exchange this sequence for a different signal sequence. Signal sequences may be selected based on their compatibility with the secretory pathway of the cell type of interest so that the payload is presented on the surface of the T cell. In some embodiments, the signal sequence may be IgE signal sequence comprising amino acid SEQ ID NO. 630 and nucleotide sequence of SEQ ID NO. 637, 730, or 731, CD8αsignal sequence (also referred to as CD8αleader) comprising amino acid SEQ ID NO. 469 and nucleotide sequence of SEQ ID NO. 511-515, or IL15Ra signal sequence (also referred to as IL15Ra leader) comprising amino acid SEQ ID NO. 732 and nucleotide sequence of SEQ ID NO. 733 or M1del CD8αsignal sequence (also referred to as M1del CD8 leader sequence) comprising amino acid sequence of SEQ ID NO. 1039 and nucleotide sequence of SEQ ID NO. 1040.

[0244] Signal sequences may also include nuclear localization signals (NLSs), nuclear export signals (NESs), polarized cell tubulo-vesicular structure localization signals (See, e.g., U.S. Pat. No. 8,993,742; Cour et al., Nucleic Acids Res. 2003, 31(1): 393-396; the contents of each of which are incorporated herein by reference in their entirety), extracellular localization signals, signals to subcellular locations (e.g. lysosome, endoplasmic reticulum, golgi, mitochondria, plasma membrane and peroxisomes, etc.) (See, e.g., U.S. Pat. No. 7,396,811; and Negi et al., Database, 2015, 1-7; the contents of each of which are incorporated herein by reference in their entirety).

[0245] In some embodiments, signal sequence may be a CD8 Leader sequence, comprising an amino acid sequence of SEQ ID NO. 469, encoded by the nucleic acid sequence of SEQ ID NO. 1202-1203, a GMCSFR Signal Peptide, comprising an amino acid sequence of SEQ ID NO. 1204, an IL2 Signal Peptide, comprising an amino acid sequence of SEQ ID NO. 1205, an 1 gK chain Signal Peptide, comprising an amino acid sequence of SEQ ID NO. 1206, an NPC2 Signal Peptide, comprising an amino acid sequence of SEQ ID NO. 1207, LAMB1 Signal Peptide of, comprising an amino acid sequence of SEQ ID NO. 1208, P31P1 Signal Peptide, comprising an amino acid sequence of SEQ ID NO. 1209, DMKN Signal Peptide, comprising an amino acid sequence of SEQ ID NO. 1210, TPA Signal Peptide, comprising an amino acid sequence of SEQ ID NO. 1211, PCSK9 Signal peptide, comprising an amino acid sequence of SEQ ID NO. 1212.

### Cleavage Sites

[0246] In some embodiments, the effector module comprises a cleavage and/or processing feature. The effector module of the present invention may include at least one protein cleavage signal/site. The protein cleavage signal/site may be located at the N terminus, the C terminus, at any space between the N and the C termini such as, but not limited to, half-way between the N and C termini, between the N terminus and the half-way point, between the half-way point and the C terminus, and combinations thereof.

[0247] The effector module may include one or more cleavage signal(s)/site(s) of any proteinases. The proteinases may be a serine proteinase, a cysteine proteinase, an endopeptidase, a dipeptidase, a metalloproteinase, a glutamic proteinase, a threonine proteinase and an aspartic proteinase. In some aspects, the cleavage site may be a signal sequence of furin, actinidain, calpain-1, carboxypeptidase A, carboxypeptidase P, carboxypeptidase Y, caspase-1, caspase-2, caspase-3, caspase-4, caspase-5, caspase-6, caspase-7, caspase-8, caspase-9, caspase-10, cathepsin B, cathepsin C, cathepsin G, cathepsin H, cathepsin K, cathepsin L, cathepsin S, cathepsin V, clostripain, chymase, chymotrypsin, elastase, endoproteinase, enterokinase, factor Xa, formic acid, granzyme B, Matrix metallopeptidase-2, Matrix metallopeptidase-3, pepsin, proteinase K, SUMO protease, subtilisin, TEV protease, thermolysin, thrombin, trypsin and TAGZyme.

[0248] In one embodiment, the cleavage site is a furin cleavage site comprising the amino acid sequence SARNRQKRS (SEQ ID NO. 561), encoded by nucleotide sequence of SEQ ID NO. 581; or a revised furin cleavage site comprising the amino acid sequence ARNRQKRS (SEQ ID NO. 562), encoded by nucleotide sequence of SEQ ID NO. 582; or a modified furin site comprising the amino acid sequence ESRRVRRNKRSK (SEQ ID NO. 471), encoded by nucleotide sequence of SEQ ID NO. 521-523.

[0249] In some embodiments, the cleavage site may be selected from, but is not limited to, a Granzyme B Cleavage site (I-E-P-D-X consensus motif) comprising the amino acid sequence of SEQ ID NO. 1216, an Enterokinase Cleavage site (Asp-Asp-Asp-Asp-Lys) comprising the amino acid sequence of SEQ ID NO. 1217, a Genenase Cleavage site (Pro-Gly-Ala-Ala-His-Tyr) comprising the amino acid sequence of SEQ ID NO. 1218, a PreScission Cleavage site (with a consensus motif) comprising the amino acid sequence of SEQ ID NO. 1219, a Thrombin Cleavage site comprising the amino acid sequence of SEQ ID NO. 1220, a TEV protease cleavage site (E-N-L-Y-F-Q-G motif) comprising the amino acid sequence of SEQ ID NO. 1221, and an Elastase cleavage site ([AGSV]-x motif), comprising the amino acid sequence of AX, GX, SX, or VX, wherein X is any amino acid.

[0250] In some embodiments, the cleavage site may be a furin cleavage site, comprising an amino acid sequence of SEQ ID NO. 1222-1231.

[0251] In some embodiments, the cleavage site may be a T2A cleavage site (SEQ ID NO. 1232), a P2A cleavage site (SEQ ID NO. 1233), E2A cleavage site (SEQ ID NO. 1234), or an F2A cleavage site (SEQ ID NO. 1235).

### Protein Tags

[0252] In some embodiments, the effector module of the invention may comprise a protein tag. The protein tag may be used for detecting and monitoring the process of the effector module. The effector module may include one or more tags such as an epitope tag (e.g., a FLAG or hemagglutinin (HA) tag). A large number of protein tags may be used for the present effector modules. They include, but are not limited to, self-labeling polypeptide tags (e.g., haloalkane dehalogenase (halotag2 or halotag7), ACP tag, clip tag, MCP tag, snap tag), epitope tags (e.g., FLAG, HA, His, and Myc), fluorescent tags (e.g., green fluorescent protein (GFP), red fluorescent protein (RFP), yellow fluorescent protein (YFP), and its variants), bioluminescent tags (e.g. luciferase and its variants), affinity tags (e.g., maltose-binding protein (MBP) tag, glutathione-S-transferase (GST) tag), immunogenic affinity tags (e.g., protein A/G, IRS, AU1, AUS, glu-glu, KT3, S-tag, HSV, VSV-G, Xpress and V5), and other tags (e.g., biotin (small molecule), StrepTag (StrepII), SBP, biotin carboxyl carrier protein (BCCP), eXact, CBP, CYD, HPC, CBD intein-chitin binding domain, Trx, NorpA, and NusA.

[0253] In some aspects, a multiplicity of protein tags, either the same or different tags, may be used; each of the tags may be located at the same N or C terminus, whereas in other cases these tags may be located at each terminus.

### Targeting Peptides

[0254] In some embodiments, the effector module of the invention may further comprise a targeting and/or penetrating peptide. Small targeting and/or penetrating peptides that selectively recognize cell surface markers (e.g. receptors, trans-membrane proteins, and extra-cellular matrix molecules) can be employed to target the effector module to the desired organs, tissues or cells. Short peptides (5-50 amino acid residues) synthesized in vitro and naturally occurring peptides, or analogs, variants, derivatives thereof, may be incorporated into the effector module for homing the effector module to the desired organs, tissues and cells, and/or subcellular locations inside the cells.

[0255] In some embodiments, a targeting sequence and/or penetrating peptide may be included in the effector module to drive the effector module to a target organ, or a tissue, or a cell (e.g., a cancer cell). In other embodiments, a targeting and/or penetrating peptide may direct the effector module to a specific subcellular location inside a cell.

[0256] A targeting peptide has any number of amino acids from about 6 to about 30 inclusive. The peptide may have 6, 7, 8, 9, 10, 11, 12, 13, 14, 15, 16, 17, 18, 19, 20, 21, 22, 23, 24, 25, 26, 27, 28, 29 or 30 amino acids. Generally, a targeting peptide may have 25 or fewer amino acids, for example, 20 or fewer, for example 15 or fewer.

### Linkers

[0257] In some embodiments, the effector module of the invention may further comprise a linker sequence. The linker region serves primarily as a spacer between two or more polypeptides within the effector module. The “linker” or “spacer”, as used herein, refers to a molecule or group of molecules that connects two molecules, or two parts of a molecule such as two domains of a recombinant protein.

[0258] In some embodiments, “Linker” (L) or “linker domain” or “linker region” or “linker module” or “peptide linker” as used herein refers to an oligo- or polypeptide region of from about 1 to 100 amino acids in length, which links together any of the domains/regions of the effector module (also called peptide linker). The peptide linker may be 1-40 amino acids in length, or 2-30 amino acids in length, or 20-80 amino acids in length, or 50-100 amino acids in length. Linker length may also be optimized depending on the type of payload utilized and based on the crystal structure of the payload. In some instances, a shorter linker length may be preferably selected. In some aspects, the peptide linker is made up of amino acids linked together by peptide bonds, preferably from 1 to 20 amino acids linked by peptide bonds, wherein the amino acids are selected from the 20 naturally occurring amino acids: Glycine (G), Alanine (A), Valine (V), Leucine (L), Isoleucine (I), Serine (S), Cysteine (C), Threonine (T), Methionine (M), Proline (P), Phenylalanine (F), Tyrosine (Y), Tryptophan (W), Histidine (H), Lysine (K), Arginine (R), Aspartate (D), Glutamic acid (E), Asparagine (N), and Glutamine (Q). One or more of these amino acids may be glycosylated, as is understood by those in the art. In some aspects, amino acids of a peptide linker may be selected from Alanine (A), Glycine (G), Proline (P), Asparagine (R), Serine (S), Glutamine (Q) and Lysine (K).

[0259] In one example, an artificially designed peptide linker may preferably be composed of a polymer of flexible residues like Glycine (G) and Serine (S) so that the adjacent protein domains are free to move relative to one another. Longer linkers may be used when it is desirable to ensure that two adjacent domains do not interfere with one another. The choice of a particular linker sequence may concern if it affects biological activity, stability, folding, targeting and/or pharmacokinetic features of the fusion construct. Examples of peptide linkers include, but are not limited to: MH, SG, GGSG (SEQ ID NO. 649; encoded by the nucleotide sequence SEQ ID NO. 650; 1041), GGSGG (SEQ ID NO. 470; encoded by any of the nucleotide sequences SEQ ID NO. 516-520), GGSGGG (SEQ ID NO. 651; encoded by any of the nucleotide sequences SEQ ID NO. 652-653), SGGGS (SEQ ID NO. 654; encoded by the nucleotide sequence SEQ ID NO. 655, 670, 709), GGSGGGSGG (SEQ ID NO. 656; encoded by the nucleotide sequence SEQ ID NO. 657), GGGGG (SEQ ID NO. 658), GGGGS (SEQ ID NO. 659) or (GGGGS)n (n=1 (SEQ ID NO. 659), 2 (SEQ ID NO. 660), 3 (SEQ ID NO. 560, encoded by the nucleotide sequence SEQ ID NO. 710-715), 4 (SEQ ID NO. 661), 5 (SEQ ID NO. 662), or 6 (SEQ ID NO. 663)), SSSSG (SEQ ID NO. 664) or (SSSSG)n (n=1 (SEQ ID NO. 664), 2 (SEQ ID NO. 665), 3 (SEQ ID NO. 666), 4 (SEQ ID NO. 667), 5 (SEQ ID NO. 668), or 6 (SEQ ID NO. 669)), SGGGSGGGGSGGGGSGGGGSGGGSLQ (SEQ ID NO. 631; encoded by the nucleotide sequence SEQ ID NO. 638, 716-720, 802), EFSTEF (SEQ ID NO. 615; encoded by any of the nucleotide sequences SEQ ID NO. 621-622), GKSSGSGSESKS (SEQ ID NO. 671), GGSTSGSGKSSEGKG (SEQ ID NO. 672), GSTSGSGKSSSEGSGSTKG (SEQ ID NO. 673), GSTSGSGKPGSGEGSTKG (SEQ ID NO. 674), VDYPYDVPDYALD (SEQ ID NO. 675; encoded by nucleotide sequence SEQ ID NO. 676), EGKSSGSGSESKEF (SEQ ID NO. 677), SGGGSGGGGSGGGGSGGGGSGGGGSGGGGSGGGS (SEQ ID NO. 721; encoded by SEQ ID NO. 723 SGGGSGGGGSGGGGSGGGGS (SEQ ID NO. 722; encoded by SEQ ID NO. 724), GS (encoded by GGTTCC), SG (encoded by AGCGGC), GSG (encoded by GGATCCGGA or GGATCCGGT), or MLLLVTSLLLCELPHPAFLLIP (SEQ ID NO. 830; encoded by SEQ ID NO. 831).

[0260] In other examples, a peptide linker may be made up of a majority of amino acids that are sterically unhindered, such as Glycine (G) and Alanine (A). Exemplary linkers are polyglycines (such as (G)4 (SEQ ID NO. 1031), (G)5 (SEQ ID NO. 658), (G)8) (SEQ ID NO. 1032), poly(GA), and polyalanines. The linkers described herein are exemplary, and linkers that are much longer and which include other residues are contemplated by the present invention.

[0261] A linker sequence may be a natural linker derived from a multi-domain protein. A natural linker is a short peptide sequence that separates two different domains or motifs within a protein.

[0262] In some aspects, linkers may be flexible or rigid. In other aspects, linkers may be cleavable or non-cleavable. As used herein, the terms “cleavable linker domain or region” or “cleavable peptide linker” are used interchangeably. In some embodiments, the linker sequence may be cleaved enzymatically and/or chemically. Examples of enzymes (e.g., proteinase/peptidase) useful for cleaving the peptide linker include, but are not limited, to Arg-C proteinase, Asp-N endopeptidase, chymotrypsin, clostripain, enterokinase, Factor Xa, glutamyl endopeptidase, Granzyme B, Achromobacter proteinase I, pepsin, proline endopeptidase, proteinase K, Staphylococcal peptidase I, thermolysin, thrombin, trypsin, and members of the Caspase family of proteolytic enzymes (e.g. Caspases 1-10). Chemical sensitive cleavage sites may also be included in a linker sequence. Examples of chemical cleavage reagents include, but are not limited to, cyanogen bromide, which cleaves methionine residues; N-chloro succinimide, iodobenzoic acid or BNPS-skatole (2-(2-nitrophenylsulfenyl)-3-methylindole), which cleaves tryptophan residues; dilute acids, which cleave at aspartyl-prolyl bonds; and e aspartic acid-proline acid cleavable recognition sites (i.e., a cleavable peptide linker comprising one or more D-P dipeptide moieties). The fusion module may include multiple regions encoding peptides of interest separated by one or more cleavable peptide linkers.

[0263] In other embodiments, a cleavable linker may be a “self-cleaving” linker peptide, such as 2A linkers (for example T2A), 2A-like linkers or functional equivalents thereof and combinations thereof. In some embodiments, the linkers include the picornaviral 2A-like linker, CHYSEL sequences of porcine teschovirus (P2A), Thosea asigna virus (T2A) or combinations, variants and functional equivalents thereof. Other linkers will be apparent to those skilled in the art and may be used in connection with alternate embodiments of the invention. In some embodiments, the biocircuits of the present invention may include 2A peptides. The 2A peptide is a sequence of about 20 amino acid residues from a virus that is recognized by a protease (2A peptidases) endogenous to the cell. The 2A peptide was identified among picornaviruses, a typical example of which is the Foot-and Mouth disease virus (Robertson B H, et. al., J Virol 1985, 54:651-660). 2A-like sequences have also been found in Picornaviridae like equine rhinitis A virus, as well as unrelated viruses such as porcine teschovirus-1 and the insect Thosea asigna virus (TaV). In such viruses, multiple proteins are derived from a large polyprotein encoded by an open reading frame. The 2A peptide mediates the co-translational cleavage of this polyprotein at a single site that forms the junction between the virus capsid and replication polyprotein domains. The 2A sequences contain the consensus motif D-V/I-E-X—N-P-G-P (SEQ ID NO. 1033). These sequences are thought to act co-translationally, preventing the formation of a normal peptide bond between the glycine and last proline, resulting in the ribosome skipping of the next codon (Donnelly M L et al. (2001). J Gen Virol, 82:1013-1025). After cleavage, the short peptide remains fused to the C terminus of the protein upstream of the cleavage site, while the proline is added to the N terminus of the protein downstream of the cleavage site. Of the 2A peptides identified to date, four have been widely used namely FMDV 2A (abbreviated herein as F2A); equine rhinitis A virus (ERAV) 2A (E2A); porcine teschovirus-1 2A (P2A) and Thoseaasigna virus 2A (T2A). In some embodiments, the 2A peptide sequences useful in the present invention are selected from SEQ ID NO.8-11 of International Patent Publication WO2010042490, the contents of which are incorporated by reference in its entirety.

[0264] As a non-limiting example, the P2A cleavable peptide may be GATNFSLLKQAGDVEENPGP (SEQ ID NO. 725; encoded by SEQ ID NO. 726).

[0265] The linkers of the present invention may also be non-peptide linkers. For example, alkyl linkers such as —NH—(CH₂) a-C(O)—, wherein a=2-20 can be used. These alkyl linkers may further be substituted by any non-sterically hindering group such as lower alkyl (e.g., C₁-C₆) lower acyl, halogen (e.g., Cl, Br), CN, NH₂, phenyl, etc.

[0266] In one embodiment, the linker may be a spacer region of one or more nucleotides. Non-limiting examples of spacers are TCTAGATAATACGACTCACTAGAGATCC (SEQ ID NO. 727), TATGGCCACAACCATG (SEQ ID NO. 728), AATCTAGATAATACGACTCACTAGAGATCC (SEQ ID NO. 729), GCTTGCCACAACCCACAAGGAGACGACCTTCC (SEQ ID NO. 800), TCGCGAATG, TCGCGA, or ATCGGGCTAGC (SEQ ID NO. 1042).

[0267] In one embodiment, the linker may be a BamHI site. As a non-limiting example, the BamHI site has the amino acid sequence GS and/or the DNA sequence GGATCC.

### Embedded Stimulus, Signals and Other Regulatory Features

[0268] In some embodiments, the effector module of the present invention may further comprise one or more microRNAs, microRNA binding sites, promotors and tunable elements. In one embodiment, microRNA may be used in support of the creation of tunable biocircuits. Each aspect or tuned modality may bring to the effector module or biocircuit a differentially tuned feature. For example, a destabilizing domain may alter cleavage sites or dimerization properties or half-life of the payload, and the inclusion of one or more microRNA or microRNA binding site may impart cellular detargeting or trafficking features. Consequently, the present invention embraces biocircuits which are multifactorial in their tenability. Such biocircuits and effector modules may be engineered to contain one, two, three, four or more tuned features.

[0269] In some embodiments, compositions of the invention may include optional proteasome adaptors. As used herein, the term “proteasome adaptor” refers to any nucleotide/amino acid sequence that targets the appended payload for degradation. In some aspects, the adaptors target the payload for degradation directly thereby circumventing the need for ubiquitination reactions. Proteasome adaptors may be used in conjunction with destabilizing domains to reduce the basal expression of the payload. Exemplary proteasome adaptors include the UbL domain of Rad23 or hHR23b, HPV E7 which binds to both the target protein Rb and the S4 subunit of the proteasome with high affinity, which allows direct proteasome targeting, bypassing the ubiquitination machinery; the protein gankyrin which binds to Rb and the proteasome subunit S6.

### Degrons

[0270] In some embodiments, the effector modules of the present invention may include degrons at their C termini. The degrons may comprise -GG, -RG, -KG, -QG, -WG, -PG, and -AG as the penultimate and the ultimate amino acids of the SREs. Furthermore, certain -2 amino acids (D, E, V, I and L) may be more enriched in the C terminus of the of the effector modules. Other degrons include, but are not limited, to RxxG motif, wherein x is any amino acid, C-terminal twin glutamic acid (EE) motif, and motifs that comprise an arginine at the -3 positions. Degrons may also be selected from the R-3 motif, G-end, R at -3, A-end, A at −2, V at −2 positions. Any of the degrons described in Koren et al., 2018, Cell 173, 1-14, may be useful in the present invention (the contents of which are incorporated by reference in their entirety). In some aspects, the expression of the effector module may be tuned by altering its overall amino acid composition. In some aspects, the amino acid composition of the effector module may be tuned to reduce basal expression. In some embodiments, basal expression may be tuned by increasing the number of bulky aromatic residues such as tryptophan (W), phenylalanine (F), and tyrosine (Y) in the effector module. Such bulky amino acids are known to reduce protein stability. In some embodiments, the amino acid composition of the SREs may be enriched with acidic residues such as, but not limited to, aspartic acid (D) and glutamic acid (E), and positively charged lysine (K), if an increase in the basal expression of the SRE is desired.

### Polynucleotides

[0271] The term “polynucleotide” or “nucleic acid molecule” in its broadest sense, includes any compound and/or substance that comprise a polymer of nucleotides, e.g., linked nucleosides. These polymers are often referred to as polynucleotides. Exemplary nucleic acids or polynucleotides of the invention include, but are not limited to, ribonucleic acids (RNAs), deoxyribonucleic acids (DNAs), threose nucleic acids (TNAs), glycol nucleic acids (GNAs), peptide nucleic acids (PNAs), locked nucleic acids (LNAs, including LNA having a β-D-ribo configuration, α-LNA having an α-L-ribo configuration (a diastereomer of LNA), 2′-amino-LNA having a 2′-amino functionalization, and 2′-amino-α-LNA having a 2′-amino functionalization) or hybrids thereof.

[0272] In one aspect, the polynucleotides may be a DNA or RNA molecule. In one aspect, the polynucleotides may comprise spatiotemporally selected codons. In one aspect, the polynucleotides of the invention may be a DNA molecule. In some embodiments, the polynucleotides may be an RNA molecule. In one aspect, the RNA molecule may be a messenger molecule. In some embodiments, the RNA molecule may be chemically modified.

[0273] In some embodiments, polynucleotides of the invention may be a messenger RNA (mRNA) or any nucleic acid molecule and may or may not be chemically modified. In one aspect, the nucleic acid molecule is an mRNA. As used herein, the term “messenger RNA (mRNA)” refers to any polynucleotide which encodes a polypeptide of interest and which is capable of being translated to produce the encoded polypeptide of interest in vitro, in vivo, in situ or ex vivo.

[0274] Traditionally, the basic components of an mRNA molecule include at least a coding region, a 5′UTR, a 3′UTR, a 5′ cap and a poly-A tail. Building on this wild type modular structure, the present invention expands the scope of functionality of traditional mRNA molecules by providing payload constructs which maintain a modular organization, but which comprise one or more structural and/or chemical modifications or alterations which impart useful properties to the polynucleotide, for example tenability of function. As used herein, a “structural” feature or modification is one in which two or more linked nucleosides are inserted, deleted, duplicated, inverted or randomized in a polynucleotide without significant chemical modification to the nucleosides themselves. Because chemical bonds will necessarily be broken and reformed to affect a structural modification, structural modifications are of a chemical nature and hence are chemical modifications. However, structural modifications will result in a different sequence of nucleotides. For example, the polynucleotide “ATCG” may be chemically modified to “AT-5meC-G”. The same polynucleotide may be structurally modified from “ATCG” to “ATCCCG”. Here, the dinucleotide “CC” has been inserted, resulting in a structural modification to the polynucleotide.

[0275] In some embodiments, polynucleotides of the present invention may harbor 5′UTR sequences which play a role in translation initiation. 5′UTR sequences may include features such as Kozak sequences which are commonly known to be involved in the process by which the ribosome initiates translation of genes, Kozak sequences have the consensus XCCR(A/G) CCAUG, where R is a purine (adenine or guanine) three bases upstream of the start codon (AUG) and X is any nucleotide. In one embodiment, the Kozak sequence is ACCGCC. By engineering the features that are typically found in abundantly expressed genes of target cells or tissues, the stability and protein production of the polynucleotides of the invention can be enhanced.

[0276] Further provided are polynucleotides, which may contain an internal ribosome entry site (IRES) which play an important role in initiating protein synthesis in the absence of 5′ cap structure in the polynucleotide. An IRES may act as the sole ribosome binding site or may serve as one of the multiple binding sites. Polynucleotides of the invention containing more than one functional ribosome binding site may encode several peptides or polypeptides that are translated independently by the ribosomes giving rise to bicistronic and/or multicistronic nucleic acid molecules.

[0277] In some embodiments, polynucleotides encoding biocircuits, effector modules, SREs and payloads of interest such as immunotherapeutic agents may include from about 30 to about 100,000 nucleotides (e.g., from 30 to 50, from 30 to 100, from 30 to 250, from 30 to 500, from 30 to 1,000, from 30 to 1,500, from 30 to 3,000, from 30 to 5,000, from 30 to 7,000, from 30 to 10,000, from 30 to 25,000, from 30 to 50,000, from 30 to 70,000, from 100 to 250, from 100 to 500, from 100 to 1,000, from 100 to 1,500, from 100 to 3,000, from 100 to 5,000, from 100 to 7,000, from 100 to 10,000, from 100 to 25,000, from 100 to 50,000, from 100 to 70,000, from 100 to 100,000, from 500 to 1,000, from 500 to 1,500, from 500 to 2,000, from 500 to 3,000, from 500 to 5,000, from 500 to 7,000, from 500 to 10,000, from 500 to 25,000, from 500 to 50,000, from 500 to 70,000, from 500 to 100,000, from 1,000 to 1,500, from 1,000 to 2,000, from 1,000 to 3,000, from 1,000 to 5,000, from 1,000 to 7,000, from 1,000 to 10,000, from 1,000 to 25,000, from 1,000 to 50,000, from 1,000 to 70,000, from 1,000 to 100,000, from 1,500 to 3,000, from 1,500 to 5,000, from 1,500 to 7,000, from 1,500 to 10,000, from 1,500 to 25,000, from 1,500 to 50,000, from 1,500 to 70,000, from 1,500 to 100,000, from 2,000 to 3,000, from 2,000 to 5,000, from 2,000 to 7,000, from 2,000 to 10,000, from 2,000 to 25,000, from 2,000 to 50,000, from 2,000 to 70,000, and from 2,000 to 100,000 nucleotides). In some aspects, polynucleotides of the invention may include more than 10,000 nucleotides.

[0278] Regions of the polynucleotides which encode certain features such as cleavage sites, linkers, trafficking signals, tags or other features may range independently from 10-1,000 nucleotides in length (e.g., greater than 20, 30, 40, 45, 50, 55, 60, 70, 80, 90, 100, 120, 140, 160, 180, 200, 250, 300, 350, 400, 450, 500, 600, 700, 800, and 900 nucleotides or at least 10, 15, 20, 25, 30, 35, 40, 45, 50, 55, 60, 70, 80, 90, 100, 120, 140, 160, 180, 200, 250, 300, 350, 400, 450, 500, 600, 700, 800, 900, and 1,000 nucleotides).

[0279] In some embodiments, polynucleotides of the present invention may further comprise embedded regulatory moieties such as microRNA binding sites within the 3′UTR of nucleic acid molecules which when bind to microRNA molecules, down-regulate gene expression either by reducing nucleic acid molecule stability or by inhibiting translation. Conversely, for the purposes of the polynucleotides of the present invention, microRNA binding sites can be engineered out of (i.e. removed from) sequences in which they naturally occur in order to increase protein expression in specific tissues. For example, miR-142 and miR-146 binding sites may be removed to improve protein expression in the immune cells. In some embodiments, any of the encoded payloads may be regulated by an SRE and then combined with one or more regulatory sequences to generate a dual or multi-tuned effector module or biocircuit system.

[0280] In some embodiments, polynucleotides of the present invention may encode fragments, variants, derivatives of polypeptides of the inventions. In some aspects, the variant sequence may keep the same or a similar activity. Alternatively, the variant may have an altered activity (e.g., increased or decreased) relative to the start sequence. Generally, variants of a particular polynucleotide or polypeptide of the invention will have at least about 40%, 45%, 50%, 55%, 60%, 65%, 70%, 75%, 80%, 85%, 90%, 91%, 92%, 93%, 94%, 95%, 96%, 97%, 98%, 99% but less than 100% sequence identity to that particular reference polynucleotide or polypeptide as determined by sequence alignment programs and parameters described herein and known to those skilled in the art. Such tools for alignment include those of the BLAST suite (Stephen et al., Gapped BLAST and PSI-BLAST: a new generation of protein database search programs, Nucleic Acids Res., 1997, 25:3389-3402.)

[0281] In some embodiments, polynucleotides of the present invention may be modified. As used herein, the terms “modified”, or as appropriate, “modification” refers to chemical modification with respect to A, G, U (T in DNA) or C nucleotides. Modifications may be on the nucleoside base and/or sugar portion of the nucleosides which comprise the polynucleotide. In some embodiments, multiple modifications are included in the modified nucleic acid or in one or more individual nucleoside or nucleotide. For example, modifications to a nucleoside may include one or more modifications to the nucleobase and the sugar. Modifications to the polynucleotides of the present invention may include any of those taught in, for example, International Publication NO. WO2013052523, the contents of which are incorporated herein by reference in its entirety.

[0282] As described herein “nucleoside” is defined as a compound containing a sugar molecule (e.g., a pentose or ribose) or a derivative thereof in combination with an organic base (e.g., a purine or pyrimidine) or a derivative thereof (also referred to herein as “nucleobase”). As described herein, “nucleotide” is defined as a nucleoside including a phosphate group.

[0283] In some embodiments, the modification may be on the internucleoside linkage (e.g., phosphate backbone). Herein, in the context of the polynucleotide backbone, the phrases “phosphate” and “phosphodiester” are used interchangeably. Backbone phosphate groups can be modified by replacing one or more of the oxygen atoms with a different substituent. Further, the modified nucleosides and nucleotides can include the wholesale replacement of an unmodified phosphate moiety with another internucleoside linkage. Examples of modified phosphate groups include, but are not limited to, phosphorothioate, phosphoroselenates, boranophosphates, boranophosphate esters, hydrogen phosphonates, phosphoramidates, phosphorodiamidates, alkyl or aryl phosphonates, and phosphotriesters. Phosphorodithioates have both non-linking oxygens replaced by sulfur. The phosphate linker can also be modified by the replacement of a linking oxygen with nitrogen (bridged phosphoramidates), sulfur (bridged phosphorothioates), and carbon (bridged methylene-phosphonates). Other modifications which may be used are taught in, for example, International Application NO. WO2013052523, the contents of which are incorporated herein by reference in their entirety.

[0284] Chemical modifications and/or substitution of the nucleotides or nucleobases of the polynucleotides of the invention which are useful in the present invention include any modified substitutes known in the art, for example, (±)1-(2-Hydroxypropyl)pseudouridine TP, (2R)-1-(2-Hydroxypropyl)pseudouridine TP, 1-(4-Methoxy-phenyl)pseudo-UTP, 2′-O-dimethyladenosine, 1,2′-O-dimethylguanosine, 1,2′-O-dimethylinosine, 1-Hexyl-pseudo-UTP, 1-Homoallylpseudouridine TP, 1-Hydroxymethylpseudouridine TP, 1-iso-propyl-pseudo-UTP, 1-Me-2-thio-pseudo-UTP, 1-Me-4-thio-pseudo-UTP, 1-Me-alphα-thio-pseudo-UTP, 1-Me-GTP, 2′-Amino-2′-deoxy-ATP, 2′-Amino-2′-deoxy-CTP, 2′-Amino-2′-deoxy-GTP, 2′-Amino-2′-deoxy-UTP, 2′-Azido-2′-deoxy-ATP, tubercidine, under modified hydroxywybutosine, uridine 5-oxyacetic acid, uridine 5-oxyacetic acid methyl ester, wybutosine, wyosine, xanthine, Xanthosine-5′-TP, xylo-adenosine, zebularine, α-thio-adenosine, α-thio-cytidine, α-thio-guanosine, and/or α-thio-uridine.

[0285] Polynucleotides of the present invention may comprise one or more of the modifications taught herein. Different sugar modifications, base modifications, nucleotide modifications, and/or internucleoside linkages (e.g., backbone structures) may exist at various positions in the polynucleotide of the invention. One of ordinary skill in the art will appreciate that the nucleotide analogs or other modification(s) may be located at any position(s) of a polynucleotide such that the function of the polynucleotide is not substantially decreased. A modification may also be a 5′ or 3′ terminal modification. The polynucleotide may contain from about 1% to about 100% modified nucleotides (either in relation to overall nucleotide content, or in relation to one or more types of nucleotide, i.e. any one or more of A, G, U or C) or any intervening percentage (e.g., from 1% to 20%, from 1% to 25%, from 1% to 50%, from 1% to 60%, from 1% to 70%, from 1% to 80%, from 1% to 90%, from 1% to 95%, from 10% to 20%, from 10% to 25%, from 10% to 50%, from 10% to 60%, from 10% to 70%, from 10% to 80%, from 10% to 90%, from 10% to 95%, from 10% to 100%, from 20% to 25%, from 20% to 50%, from 20% to 60%, from 20% to 70%, from 20% to 80%, from 20% to 90%, from 20% to 95%, from 20% to 100%, from 50% to 60%, from 50% to 70%, from 50% to 80%, from 50% to 90%, from 50% to 95%, from 50% to 100%, from 70% to 80%, from 70% to 90%, from 70% to 95%, from 70% to 100%, from 80% to 90%, from 80% to 95%, from 80% to 100%, from 90% to 95%, from 90% to 100%, and from 95% to 100%).

[0286] In some embodiments, one or more codons of the polynucleotides of the present invention may be replaced with other codons encoding the native amino acid sequence to tune the expression of the SREs, through a process referred to as codon selection. Since mRNA codon, and tRNA anticodon pools tend to vary among organisms, cell types, sub cellular locations and over time, the codon selection described herein is a spatiotemporal (ST) codon selection.

[0287] In some embodiments of the invention, certain polynucleotide features may be codon optimized. For example, a preferred region for codon optimization may be upstream (5′) or downstream (3′) to a region which encodes a polypeptide. These regions may be incorporated into the polynucleotide before and/or after codon optimization of the payload encoding region or open reading frame (ORF).

[0288] Spatiotemporal codon selection may impact the expression of the polynucleotides of the invention, since codon composition determines the rate of translation of the mRNA species and its stability. For example, tRNA anticodons to optimized codons are abundant, and thus translation may be enhanced. In contrast, tRNA anticodons to less common codons are fewer and thus translation may proceed at a slower rate. Presnyak et al. have shown that the stability of an mRNA species is dependent on the codon content, and higher stability and thus higher protein expression may be achieved by utilizing optimized codons (Presnyak et al. (2015) Cell 160, 1111-1124; the contents of which are incorporated herein by reference in their entirety). Thus, in some embodiments, ST codon selection may include the selection of optimized codons to enhance the expression of the SRES, effector modules and biocircuits of the invention. In other embodiments, spatiotemporal codon selection may involve the selection of codons that are less commonly used in the genes of the host cell to decrease the expression of the compositions of the invention. The ratio of optimized codons to codons less commonly used in the genes of the host cell may also be varied to tune expression.

[0289] In some embodiments, certain regions of the polynucleotide may be preferred for codon selection. For example, a preferred region for codon selection may be upstream (5′) or downstream (3′) to a region which encodes a polypeptide. These regions may be incorporated into the polynucleotide before and/or after codon selection of the payload encoding region or open reading frame (ORF).

[0290] The stop codon of the polynucleotides of the present invention may be modified to include sequences and motifs to alter the expression levels of the SREs, payloads and effector modules of the present invention. Such sequences may be incorporated to induce stop codon readthrough, wherein the stop codon may specify amino acids e.g. selenocysteine or pyrrolysine. In other instances, stop codons may be skipped altogether to resume translation through an alternate open reading frame. Stop codon read through may be utilized to tune the expression of components of the effector modules at a specific ratio (e.g. as dictated by the stop codon context). Examples of preferred stop codon motifs include UGAN, UAAN, and UAGN, where N is either C or U. Polynucleotide modifications and manipulations can be accomplished by methods known in the art such as, but not limited to, site directed mutagenesis and recombinant technology. The resulting modified molecules may then be tested for activity using in vitro or in vivo assays such as those described herein, or any other suitable screening assay known in the art.

[0291] In some embodiments, polynucleotides of the invention may comprise two or more effector module sequences, or two or more payloads of interest sequences, which are in a pattern such as ABABAB or AABBAABBAABB or ABCABCABC or variants thereof repeated once, twice, or more than three times. In these patterns, each letter, A, B, or C represent a different effector module component.

[0292] In yet another embodiment, polynucleotides of the invention may comprise two or more effector module component sequences with each component having one or more SRE sequences (DD sequences), or two or more payload sequences. As a non-limiting example, the sequences may be in a pattern such as ABABAB or AABBAABBAABB or ABCABCABC or variants thereof repeated once, twice, or more than three times in each of the regions. As another non-limiting example, the sequences may be in a pattern such as ABABAB or AABBAABBAABB or ABCABCABC or variants thereof repeated once, twice, or more than three times across the entire polynucleotide. In these patterns, each letter, A, B, or C represent a different sequence or component.

[0293] According to the present invention, polynucleotides encoding distinct biocircuits, effector modules, SREs and payloads may be linked together through the 3′-end using nucleotides which are modified at the 3′ terminus. Chemical conjugation may be used to control the stoichiometry of delivery into cells. Polynucleotides can be designed to be conjugated to other polynucleotides, dyes, intercalating agents (e.g. acridines), cross-linkers (e.g. psoralene, mitomycin C), porphyrins (TPPC4, texaphyrin, sapphyrin), polycyclic aromatic hydrocarbons (e.g., phenazine, dihydrophenazine), artificial endonucleases (e.g. EDTA), alkylating agents, phosphate, amino, mercapto, PEG (e.g., PEG-40K), MPEG, (MPEG)₂, polyamino, alkyl, substituted alkyl, radiolabeled markers, enzymes, haptens (e.g. biotin), transport/absorption facilitators (e.g., aspirin, vitamin E, folic acid), synthetic ribonucleases, proteins, e.g., glycoproteins, or peptides, e.g., molecules having a specific affinity for a co-ligand, or antibodies e.g., an antibody, that binds to a specified cell type such as a cancer cell, endothelial cell, or bone cell, hormones and hormone receptors, non-peptidic species, such as lipids, lectins, carbohydrates, vitamins, cofactors, or a drug. As non-limiting examples, they may be conjugates with other immune conjugates.

[0294] In some embodiments, the compositions of the polynucleotides of the invention may generated by combining the various components of the effector modules using the Gibson assembly method. The Gibson assembly reaction consists of three isothermal reactions, each relying on a different enzymatic activity including a 5′ exonuclease which generates long overhangs, a polymerase which fills in the gaps of the annealed single strand regions and a DNA ligase which seals the nicks of the annealed and filled-in gaps. Polymerase chain reactions are performed prior to Gibson assembly which may be used to generate PCR products with overlapping sequence. These methods can be repeated sequentially, to assemble larger and larger molecules. For example, the method can comprise repeating a method as above to join a second set of two or more DNA molecules of interest to one another, and then repeating the method again to join the first and second set DNA molecules of interest, and so on. At any stage during these multiple rounds of assembly, the assembled DNA can be amplified by transforming it into a suitable microorganism, or it can be amplified in vitro (e.g., with PCR).

[0295] In some embodiments, polynucleotides of the present invention may encode a fusion polypeptide comprising a destabilizing domain (DD) and at least one immunotherapeutic agent taught herein. The DD domain may be a FKBP mutant encoded by nucleotide sequence of SEQ ID NO. 524-526, 528-531, 787-789, 794, 812, and/or 827, an ecDHFR mutant encoded by nucleotide sequence of SEQ ID NO. 527, 532, 603, 627, 641-642, 788, 791, and/or 793, hDHFR mutant encoded by nucleotide sequence of SEQ ID NO. 533-540, 604, 678-683 and/or 734-780, and/or 795-798.

[0296] In some embodiments, the polynucleotides of the invention may encode effector modules comprising the CD19 CAR as the payload comprising the nucleotide sequence of SEQ ID NO. 541-555 and/or 818-841, or IL12 as the payload comprising the nucleotide sequence of SEQ ID NO. 605-613 and/or 847-852, or IL15 as the payload comprising the nucleotide sequence of SEQ ID NO. 580, 628-629, and/or 853-854, or IL15/IL15Ra fusion polypeptide as the payload comprising the nucleotide sequence of SEQ ID NO. 643-648, 884-911, 918, and/or 921.

### Cells

[0297] In accordance with the present invention, cells genetically modified to express at least one biocircuit, SRE (e.g, DD), effector module and immunotherapeutic agent of the invention, are provided. Cells of the invention may include, without limitation, immune cells, stem cells and tumor cells. In some embodiments, immune cells are immune effector cells, including, but not limiting to, T cells such as CD8⁺ T cells and CD4⁺ T cells (e.g., Th1, Th2, Th17, Foxp3+ cells), memory T cells such as T memory stem cells, central T memory cells, and effector memory T cells, terminally differentiated effector T cells, natural killer (NK) cells, NK T cells, tumor infiltrating lymphocytes (TILs), cytotoxic T lymphocytes (CTLs), regulatory T cells (Tregs), and dendritic cells (DCs), other immune cells that can elicit an effector function, or the mixture thereof. T cells may be Tarβ cells and Tγδ cells. In some embodiments, stem cells may be from human embryonic stem cells, mesenchymal stem cells, and neural stem cells. In some embodiments, T cells may be depleted endogenous T cell receptors (See U.S. Pat. Nos. 9,273,283; 9,181,527; and 9,028,812; the contents of each of which are incorporated herein by reference in their entirety).

[0298] In some embodiments, cells of the invention may be autologous, allogeneic, syngeneic, or xenogeneic in relation to a particular individual subject.

[0299] In some embodiments, cells of the invention may be mammalian cells, particularly human cells. Cells of the invention may be primary cells or immortalized cell lines.

[0300] Engineered immune cells can be accomplished by transducing a cell, compositions with a polypeptide of a biocircuit, an effector module, a SRE and/or a payload of interest (i.e., immunotherapeutic agent), or a polynucleotide encoding said polypeptide, or a vector comprising said polynucleotide. The vector may be a viral vector such as a lentiviral vector, a gamma-retroviral vector, a recombinant AAV, an adenoviral vector and an oncolytic viral vector. In other aspects, non-viral vectors for example, nanoparticles and liposomes may also be used. In some embodiments, immune cells of the invention are genetically modified to express at least one immunotherapeutic agent of the invention which is tunable using a stimulus. In some examples, two, three or more immunotherapeutic agents constructed in the same biocircuit and effector module are introduced into a cell. In other examples, two, three, or more biocircuits, effector modules, each of which comprises an immunotherapeutic agent, may be introduced into a cell.

[0301] In some embodiments, immune cells of the invention may be T cells modified to express an antigen-specific T cell receptor (TCR), or an antigen specific chimeric antigen receptor (CAR) taught herein (known as CAR T cells). Accordingly, at least one polynucleotide encoding a CAR system (or a TCR) described herein, or a vector comprising the polynucleotide is introduced into a T cell. The T cell expressing the CAR or TCR binds to a specific antigen via the extracellular targeting moiety of the CAR or TCR, thereby a signal via the intracellular signaling domain (s) is transmitted into the T cell, and as a result, the T cell is activated. The activated CAR T cell changes its behavior including release of a cytotoxic cytokine (e.g., a tumor necrosis factor, and lymphotoxin, etc.), improvement of a cell proliferation rate, change in a cell surface molecule, or the like. Such changes cause destruction of a target cell expressing the antigen recognized by the CAR or TCR. In addition, release of a cytokine or change in a cell surface molecule stimulates other immune cells, for example, a B cell, a dendritic cell, a NK cell, and a macrophage.

[0302] The CAR introduced into a T cell may be a first-generation CAR including only the intracellular signaling domain from TCR CD3zeta, or a second-generation CAR including the intracellular signaling domain from TCR CD3zeta and a costimulatory signaling domain, or a third-generation CAR including the intracellular signaling domain from TCR CD3zeta and two or more costimulatory signaling domains, or a split CAR system, or an on/off switch CAR system. In one example, the expression of the CAR or TCR is controlled by a destabilizing domain (DD) such as a hDHFR mutant, in the effector module of the invention. The presence or absence of hDHFR binding ligand such as TMP is used to tune the CAR or TCR expression in transduced T cells or NK cells.

[0303] In some embodiments, CAR T cells of the invention may be further modified to express another one, two, three or more immunotherapeutic agents. The immunotherapeutic agents may be another CAR or TCR specific to a different target molecule; a cytokine such as IL2, IL12, IL15 and IL18, or a cytokine receptor such as IL15Ra; a chimeric switch receptor that converts an inhibitory signal to a stimulatory signal; a homing receptor that guides adoptively transferred cells to a target site such as the tumor tissue; an agent that optimizes the metabolism of the immune cell; or a safety switch gene (e.g., a suicide gene) that kills activated T cells when a severe event is observed after adoptive cell transfer or when the transferred immune cells are no-longer needed. These molecules may be included in the same effector module or in separate effector modules.

[0304] In one embodiment, the CAR T cell (including TCR T cell) of the invention may be an “armed” CAR T cell which is transformed with an effector module comprising a CAR and an effector module comprising a cytokine. The inducible or constitutively secrete active cytokines further armor CAR T cells to improve efficacy and persistence. In this context, such CAR T cell is also referred to as “armored CAR T cell”. The “armor” molecule may be selected based on the tumor microenvironment and other elements of the innate and adaptive immune systems. In some embodiments, the molecule may be a stimulatory factor such as IL2, IL12, IL15, IL18, type I IFN, CD40L and 4-1BBL which have been shown to further enhance CAR T cell efficacy and persistence in the face of a hostile tumor microenvironment via different mechanisms (Yeku et al., Biochem Soc Trans., 2016, 44(2): 412-418).

[0305] Chimeric Antigen Receptor engineered T cells (CAR-T) therapies have yet to be successfully applied to solid tumors. Enhancing CAR-T cell functionality and selectively delivering cargo to the site of solid tumors represent key tactics to achieve effective CAR-T therapy for solid tumors. In one embodiment, Interleukin 12 (IL12) may be utilized to enhance the effectiveness of CAR-T cells, especially since it has the potential to remodel the tumor microenvironment. IL12 has been previously shown to be effective in enhancing efficacy of CAR or TCR modified T-cells as well as tumor infiltrating lymphocytes (TILs) in preclinical and clinical models. However, constitutive production of IL12 can compromise safety and/or efficacy; therefore, on demand, local delivery of the cytokine may be a preferred approach. In some embodiments, biocircuits of the present invention may be utilized to exogenously control IL12 expression to enable the use of IL12 in adoptive cell therapy.

[0306] In some embodiments, DD regulated Flexi IL12 constructs may be used to improve the efficacy of the CARs, especially in solid tumor settings, by providing a controlled local signal for tumor microenvironment remodeling and epitope spreading. DD regulation also provides rapid, dose dependent, and local production of Flexi IL12.

[0307] In some aspects, the armed CAR T cell of the invention is modified to express a CD19 CAR and IL12. Such T cells, after CAR mediated activation in the tumor, release inducible IL12 which augments T-cell activation and attracts and activates innate immune cells to eliminate CD19-negative cancer cells.

[0308] In one embodiment, T cells of the invention may be modified to express an effector module comprising a CAR and an effector module comprising a suicide gene.

[0309] In one embodiment, the CAR T cell (including TCR T cell) of the invention may be transformed with effector modules comprising a cytokine and a safety switch gene (e.g., suicide gene). The suicide gene may be an inducible caspase such as caspase 9 which induces apoptosis, when activated by an extracellular stimulus of a biocircuit system. Such induced apoptosis eliminates transferred cell as required to decrease the risk of direct toxicity and uncontrolled cell proliferation.

[0310] In some embodiments, immune cells of the invention may be NK cells modified to express an antigen-specific T cell receptor (TCR), or an antigen specific chimeric antigen receptor (CAR) taught herein.

[0311] Natural killer (NK) cells are members of the innate lymphoid cell family and characterized in humans by expression of the phenotypic marker CD56 (neural cell adhesion molecule) in the absence of CD3 (T-cell co-receptor). NK cells are potent effector cells of the innate immune system which mediate cytotoxic attack without the requirement of prior antigen priming, forming the first line of defense against diseases including cancer malignancies and viral infection.

[0312] NK cell activation is characterized by an array of receptors with activating and inhibitory functions. The important activation receptors on NK cells include CD94/NKG2C and NKG2D (the C-type lectin-like receptors), and the natural cytotoxicity receptors (NCR) NKp30, NKp44 and NKp46, which recognize ligands on tumor cells or virally infected cells. NK cell inhibition is essentially mediated by interactions of the polymorphic inhibitory killer cell immunoglobulin-like receptors (KIRs) with their cognate human—leukocyte—antigen (HLA) ligands via the alpha-1 helix of the HLA molecule. The balance between signals that are generated from activating receptors and inhibitory receptors mainly determines the immediate cytotoxic activation.

[0313] NK cells may be isolated from peripheral blood mononuclear cells (PBMCs) or derived from human embryonic stem (ES) cells and induced pluripotent stem cells (iPSCs). The primary NK cells isolated from PBMCs may be further expanded for adoptive immunotherapy. Strategies and protocols useful for the expansion of NK cells may include interleukin 2 (IL2) stimulation and the use of autologous feeder cells, or the use of genetically modified allogeneic feeder cells. In some aspects, NK cells can be selectively expanded with a combination of stimulating ligands including IL15, IL21, IL2, 41BBL, IL12, IL18, MICA, 2B4, LFA-1, and BCM1/SLAMF2 (e.g., US patent publication NO. US20150190471).

[0314] Immune cells expressing effector modules comprising a CAR and/or other immunotherapeutic agents can be used as cancer immunotherapy. The immunotherapy comprises the cells expressing a CAR and/or other immunotherapeutic agents as an active ingredient and may further comprise a suitable excipient. Examples of the excipient may include the aforementioned pharmaceutically acceptable excipients, including various cell culture media, and isotonic sodium chloride.

[0315] In some embodiments, cells of the present invention may be dendritic cells that are genetically modified to express the compositions of the invention. Such cells may be used as cancer vaccines.

[0316] In some embodiments, the composition comprising

[0317] (a) an effector module, said effector module comprising a stimulus response element (SRE) operably linked to an immunotherapeutic agent, wherein
[0318] (i) the immunotherapeutic agent is a cytokine or a cytokine-cytokine receptor fusion protein; and
[0319] (ii) the SRE is a DD, said DD derived from a parent protein or a mutant protein having one, two, three or more amino acid mutations compared to said parent protein, wherein the parent protein is selected from
[0320] (i′) human DHFR (hDHFR) (SEQ ID NO. 1);
[0321] (ii′) E. coli DHFR (ecDHFR) (SEQ ID NO. 2); and
[0322] (iii′) human protein FKBP (SEQ ID NO. 3; 1087);

[0323] (b) a chimeric antigen receptor (CAR), wherein the chimeric antigen receptor is operably linked to said effector module.

[0324] In some embodiments, the immunotherapeutic agent is a cytokine and wherein said cytokine is IL12.

[0325] In some embodiments, the IL12 is a fusion protein comprising a p40 subunit, a linker, and a p35 subunit.

[0326] In some embodiments, the p40 subunit is a p40 (23-328 of WT) (SEQ ID NO. 563), a p40 (WT) (SEQ ID NO.1091) or a p40 (23-328 of WT) (K217N) (SEQ ID NO. 578).

[0327] In some embodiments, the p40 subunit is p40 (23-328 of WT) (SEQ ID NO. 563).

[0328] In some embodiments, the p35 subunit is a p35 (57-253 of WT) (SEQ ID NO. 564) or p35 (WT) (SEQ ID NO. 1093).

[0329] In some embodiments, the p35 subunit is a p35 (57-253 of WT) (SEQ ID NO. 564).

[0330] In some embodiments, the immunotherapeutic agent is a cytokine-cytokine receptor fusion protein.

[0331] In some embodiments, the cytokine-cytokine receptor fusion polypeptide comprises the whole or a portion of SEQ. ID NO. 616, 632 fused to the whole or a portion of any of SEQ. ID NOs. 632; 855, 1097 to produce a IL15-IL15 receptor fusion polypeptide.

[0332] In some embodiments, the parent protein is hDHFR and the DD comprises a mutant protein having:

[0333] (a) a single mutation selected from the group consisting of hDHFR (I17V), hDHFR (F59S), hDHFR (N65D), hDHFR (K81R), hDHFR (A107V), hDHFR (Y122I), hDHFR (N127Y), hDHFR (M1400, hDHFR (K185E), hDHFR (N186D), and hDHFR (M1400;

[0334] (b) a double mutation selected from the group consisting of hDHFR (M1del, I17A), hDHFR (M1del, N127Y), hDHFR (M1del, I17V), hDHFR (M1del, Y122I), hDHFR (M1del, K185E), hDHFR (C7R, Y163C), hDHFR (A10V, H88Y), hDHFR (Q36K, Y122I), hDHFR (M53T, R138I), hDHFR (T57A, I72A), hDHFR (E63G, I176F), hDHFR (G21T, Y122I), hDHFR (L74N, Y122I), hDHFR (V75F, Y122I), hDHFR (L94A, T147A), DHFR (V121A, Y22I), hDHFR (Y122I, A125F), hDHFR (H131R, E144G), hDHFR (T137R, F143L), hDHFR (Y178H, E18IG), hDHFR (Y183H, K185E), hDHFR (E162G, I176F), and hDHFR (M1del, M1400;

[0335] (c) a triple mutation selected from the group consisting of hDHFR (V9A, S93R, P150L), hDHFR (I8V, K133E, Y163C), hDHFR (L23S, V121A, Y157C), hDHFR (K19E, F89L, E181G), hDHFR (Q36F, N65F, Y122I), hDHFR (G54R, M140V, S168C), hDHFR (V110A, V136M, K177R), hDHFR (Q36F, Y122I, A125F), hDHFR (N49D, F59S, D153G), hDHFR (G21E, I72V, I176T), hDHFR (M1del, 117A, Y122I), hDHFR (M1del, I17V, Y122I), hDHFR (M1del, N127Y, Y122I), hDHFR (M1del, E162G, I176F), hDHFR (M1del, H131R, E144G), and hDHFR (M1del, Y122I, A125F); or

[0336] (d) a quadruple or higher mutation selected from the group consisting of hDHFR (M1del, Q36F, Y122I, A125F), hDHFR (M1del, Y122I, H131R, E144G), hDHFR (M1del, E31D, F32M, V116I), hDHFR (M1del, Q36F, N65F, Y122I), hDHFR (V2A, R33G, Q36R, L100P, K185R), hDHFR (M1del, D22S, F32M, R33S, Q36S, N65S), hDHFR (I17N, L98S, K99R, M112T, E151G, E162G, E172G), hDHFR (G16S, I17V, F89L, D96G, K123E, M140V, D146G, K156R), hDHFR (K81R, K99R, L100P, E102G, N108D, K123R, H128R, D142G, F180L, K185E), hDHFR (R138G, D142G, F143S, K156R, K158E, E162G, V166A, K177E, Y178C, K185E, N186S), hDHFR (N14S, P24S, F35L, M53T, K56E, R92G, S93G, N127S, H128Y, F135L, F143S, L159P, L160P, E173A, F180L), hDHFR (F35L, R37G, N65A, L68S, K69E, R71G, L80P, K99G, G117D, L132P, I139V, M140I, D142G, D146G, E173G, D187G), hDHFR (L28P, N30H, M38V, V44A, L68S, N73G, R78G, A97T, K99R, A107T, K109R, D111N, L134P, F135V, T147A, I152V, K158R, E172G, V182A, E184R), hDHFR (V2A, I17V, N30D, E31G, Q36R, F59S, K69E, I72T, H88Y, F89L, N108D, K109E, V110A, 1115V, Y122D, L132P, F135S, M140V, E144G, T147A, Y157C, V170A, K174R, N186S), hDHFR (L100P, E102G, Q103R, P104S, E105G, N108D, V113A, W114R, Y122C, M126I, N127R, H128Y, L132P, F135P, I139T, F148S, F149L, I152V, D153A, D169G, V170A, I176A, K177R, V182A, K185R, N186S), and hDHFR (A10T, Q13R, N14S, N20D, P24S, N30S, M38T, T40A, K47R, N49S, K56R, I61T, K64R, K69R, I72A, R78G, E82G, F89L, D96G, N108D, M112V, W114R, Y122D, K123E, I139V, Q141R, D142G, F148L, E151G, E155G, Y157R, Q171R, Y183C, E184G, K185del, D187N).

[0337] In some embodiments, the DD comprises the mutant protein having three mutations hDHFR (M1del, Y122I, N127Y).

[0338] In some embodiments, the DD comprises the mutant protein having three mutations hDHFR (M1del, I17V, Y122I).

[0339] In some embodiments, the DD comprises the mutant protein having two mutations hDHFR (M1del, I17V).

[0340] In some embodiments, the CAR comprises

[0341] (a) an extracellular target moiety;

[0342] (b) a transmembrane domain;

[0343] (c) an intracellular signaling domain; and

[0344] (d) optionally, one or more co-stimulatory domains.

[0345] In some embodiments, the extracellular target moiety is selected from any of:

[0346] a single chain variable fragment (scFv),

[0347] an Ig NAR,

[0348] a Fab fragment,

[0349] a Fab′ fragment,

[0350] a F(ab)′2 fragment,

[0351] a F(ab)′3 fragment,

[0352] an Fv,

[0353] a bis-scFv, a (scFv)2,

[0354] a minibody,

[0355] a diabody,

[0356] a triabody,

[0357] a tetrabody,

[0358] an intrabody,

[0359] a disulfide stabilized Fv protein (dsFv),

[0360] a unibody,

[0361] a nanobody, and

[0362] an antigen binding region derived from an antibody that specifically binds to any of a protein of interest, a ligand, a receptor, a receptor fragment or a peptide aptamer.

[0363] In some embodiments, the extracellular target moiety is a scFv derived from an antibody that specifically binds a CD19 antigen.

[0364] In some embodiments, the scFv is a CD19 scFv is selected from the group consisting of:

[0365] (a) an amino acid sequence selected from the group consisting of SEQ ID NOs: 465; 83-227; 1034-1036; or

[0366] (b) a heavy chain variable region having an amino acid sequence independently selected from the group consisting of SEQ ID NO: 9-40, 1169, and a light chain variable region having an amino acid sequence independently selected from the group consisting of SEQ ID NOs: 41-82, 1170.

[0367] In some embodiments, (a) the intracellular signaling domain of the CAR is the signaling domain derived from T cell receptor CD3zeta or a cell surface molecule selected from the group consisting of FcR gamma, FcR beta, CD3 gamma, CD3 delta, CD3 epsilon, CD5, CD22, CD79a, CD79b, and CD66d; and

[0368] (b) the co-stimulatory domain is present and is selected from the group consisting of 4-1BB (CD137), 2B4, HVEM, ICOS, LAG3, DAP10, DAP12, CD27, CD28, OX40 (CD134), CD30, CD40, ICOS (CD278), glucocorticoid-induced tumor necrosis factor receptor (GITR), lymphocyte function-associated antigen-1 (LFA-1), CD2, CD7, LIGHT, NKG2C, and B7-H3.

[0369] In some embodiments, the intracellular signaling domain of the CAR is a T cell receptor CD3zeta signaling domain comprising the amino acid sequence of SEQ ID NO: 229.

[0370] In some embodiments, the intracellular signaling domain of the CAR is a T cell receptor CD3zeta signaling domain comprising the amino acid sequence of SEQ ID NO: 467 and the co-stimulatory domain is present, said co-stimulatory domain being selected from amino acid sequence of SEQ ID NOs: 233, 228-232, and 234-334.

[0371] In some embodiments, the transmembrane domain is derived from any of the members of the group consisting of:

[0372] (a) a molecule selected from the group consisting of CD8α, CD4, CD5, CD8, CD8α, CD9, CD16, CD22, CD33, CD28, CD37, CD45, CD64, CD80, CD86, CD148, DAP 10, EpoRI, GITR, LAG3, ICOS, Her2, OX40 (CD134), 4-1BB (CD137), CD152, CD154, PD-1, or CTLA-4

[0373] (b) a transmembrane region of an alpha, beta or zeta chain of a T-cell receptor;

[0374] (c) the CD3 epsilon chain of a T-cell receptor; and

[0375] (d) an immunoglobulin selected from IgG1, IgD, IgG4, and an IgG4 Fc region.

[0376] In some embodiments, the transmembrane domain comprises an amino acid sequence selected from the group consisting of SEQ ID NOs. 369, 335-368, 370-385 and 697-707.

[0377] In some embodiments, the CAR further comprises a hinge region near the transmembrane domain, said hinge region comprising an amino acid sequence selected from the group consisting of SEQ ID NOs. 400, 386-399, and 401-464.

[0378] In some embodiments, the SRE is responsive to or interacts with at least one stimulus.

[0379] In some embodiments, the stimulus is Trimethoprim (TMP) or Methotrexate (MTX).

[0380] In some embodiments, the invention comprises (a) an effector module is selected from the group consisting of SEQ ID NO. 1121, 1123, 1129, 1131, 1133, 1135, 1137, 1139, and 1141; and

[0381] (b) the CAR is selected from the group consisting of SEQ ID NO. 1120, 1122, 1128, 1130, 1132, 1134, 1136, 1138, and 1140.

[0382] In some embodiments, the composition described herein comprises the amino acid sequence selected from the group consisting of SEQ ID NO. 1127, 1125, 1126, 1082, 1118, 1119, 1124, or 1127.

[0383] In some embodiments, the invention comprises a polynucleotide encoding any of the compositions described herein.

[0384] In some embodiments, the invention comprises a vector comprising a polynucleotide described herein.

[0385] In some embodiments, the inventive comprises an immune cell for adoptive cell transfer (ACT), which expresses the compositions described herein, the polynucleotides described herein, and/or is transduced or transfected with the vector described herein.

[0386] In some embodiments, the invention comprises a method of inducing an immune response in a subject comprising (a) preparing an immune cell comprising the compositions described herein; and (b) administering an effective amount of the immune cells to the subject thereby inducing an immune response.

[0387] In some embodiments, the invention comprises a method of inducing the expression of T cell activation markers comprising administering to a cell or a subject, an effective amount of any the compositions described herein.

[0388] In some embodiments, the invention or compositions comprises an engineered cell comprising:

[0389] (a) a first recombinant protein comprising an effector module, said effector module comprising:
[0390] (i) a stimulus response element (SRE) linked to at least one recombinant protein selected from: a cytokine, a cytokine-cytokine receptor fusion protein, and a CD19 chimeric antigen receptor (CD19 CAR); and
[0391] (ii) the SRE comprises a DD, wherein said DD is derived from a parent protein or a mutant protein having one or more amino acid mutations in the amino acid sequence of the DD compared to said parent protein, wherein the parent protein is selected from the group consisting of:
[0392] (i) human DHFR (hDHFR) (SEQ ID NO: 1);
[0393] (ii) E. coli DHFR (ecDHFR) (SEQ ID NO: 2); and
[0394] (iii) human protein FKBP (SEQ ID NOs: 3 or 1087); and

[0395] (b) optionally, a second recombinant protein comprising a CD19 chimeric antigen receptor (CAR).

[0396] In some embodiments, the cytokine comprises IL12, IL15, or combinations thereof.

[0397] In some embodiments, the IL12 is a fusion protein comprising a p40 subunit, a linker, and a p35 subunit.

[0398] In some embodiments, the p40 subunit is a p40 (23-328 of WT) (SEQ ID NO: 563), a p40 (WT) (SEQ ID NO:1091) or a p40 (23-328 of WT) (K217N) (SEQ ID NO: 578).

[0399] In further embodiments, the p40 subunit is p40 (23-328 of WT) (SEQ ID NO: 563).

[0400] In some embodiments, the p35 subunit is a p35 (57-253 of WT) (SEQ ID NO: 564) or p35 (WT) (SEQ ID NO: 1093).

[0401] In further embodiments, the p35 subunit is a p35 (57-253 of WT) (SEQ ID NO: 564).

[0402] In some embodiments, the cytokine-cytokine receptor fusion polypeptide comprises the whole or a portion of SEQ. ID NOs: 616, 632 fused to the whole or a portion of any of SEQ. ID NOs: 632; 855, or 1097 to produce a IL15-1L15 receptor fusion polypeptide.

[0403] In some embodiments, the parent protein is a human DHFR (hDHFR), and the DD comprises one or more mutations selected from the group consisting of: Mdel1, I17A, I17V, Q36F, Q36K, N65F, Y122I, N127Y, and A125F.

[0404] In some embodiments, the parent protein is a human DHFR (hDHFR), and the DD comprises one or more mutations selected from:

[0405] a single mutation selected from the group consisting of: Mdel1, I17A, I17V, Q36F, Q36K, N65F, Y122I, and A125F;

[0406] a double mutation selected from the group consisting of: (M1del, I17A), (M1del, I17V), and (M1del, Y122I);

[0407] a triple mutation selected from the group consisting of: (M1del, Y122I, A125F), (M1del, Q36K, Y122I), (M1del, I17V, Y122I), and (M1del, I17A, Y122I); and

[0408] a quadruple or higher mutation selected from the group consisting of: (M1del, Q36F, N65F, Y122I).

[0409] In some embodiments, the DD comprises an hDHFR mutant protein having three mutations (M1del, Y122I, N127Y).

[0410] In some embodiments, the DD comprises an hDHFR mutant protein having three mutations (M1del, I17V, Y122I).

[0411] In some embodiments, the DD comprises an hDHFR mutant protein having two mutations (M1 del, I17V).

[0412] In some embodiments, the CD19 CAR is linked to the effector module.

[0413] In other embodiments, the CD19 CAR is not linked to the effector module.

[0414] In some embodiments, the CD19 CAR comprises:

[0415] (a) a CD19 binding moiety;

[0416] (b) a transmembrane domain;

[0417] (c) an intracellular signaling domain; and

[0418] (d) optionally, one or more co-stimulatory domains.

[0419] In some embodiments, the CD19 binding moiety is selected from:

[0420] a single chain variable fragment (scFv),

[0421] an Ig NAR,

[0422] a Fab fragment,

[0423] a Fab′ fragment,

[0424] a F(ab)′2 fragment,

[0425] a F(ab)′3 fragment,

[0426] an Fv,

[0427] a bis-scFv, a (scFv)2,

[0428] a minibody,

[0429] a diabody,

[0430] a triabody,

[0431] a tetrabody,

[0432] an intrabody,

[0433] a disulfide stabilized Fv protein (dsFv),

[0434] a unibody,

[0435] a nanobody, and

[0436] an antigen binding region derived from any one of (a) to (p) that binds to CD19.

[0437] In some embodiments, the CD19 binding moiety is a scFv that specifically binds a CD19 antigen.

[0438] In some embodiments, the scFv is a CD19 scFv comprising an amino acid sequence of SEQ ID NO: 465.

[0439] In some embodiments, the cytokine, cytokine-cytokine receptor fusion protein or CAR component is further linked to at least one of:

[0440] (a) a leader sequence;

[0441] (b) a signal peptide:

[0442] (c) a linker;

[0443] (d) a spacer;

[0444] (e) a cleavage site;

[0445] (f) a tag;

[0446] (g) a co-stimulatory domain;

[0447] (h) a fluorescence protein; and

[0448] (i) a hinge.

[0449] In some embodiments, the intracellular signaling domain of the CD19 CAR is the signaling domain derived from T cell receptor CD3zeta or a cell surface molecule selected from the group consisting of FcR gamma, FcR beta, CD3 gamma, CD3 delta, CD3 epsilon, CD5, CD22, CD79a, CD79b, and CD66d; and the co-stimulatory domain is present and is selected from the group consisting of 4-1BB (CD137), 2B4, HVEM, ICOS, LAG3, DAP10, DAP12, CD27, CD28, OX40 (CD134), CD30, CD40, ICOS (CD278), glucocorticoid-induced tumor necrosis factor receptor (GITR), lymphocyte function-associated antigen-1 (LFA-1), CD2, CD7, LIGHT, NKG2C, and B7-H3.

[0450] In some embodiments, the intracellular signaling domain of the CD19 CAR comprises a T-cell receptor CD3zeta signaling domain comprising the amino acid sequence of SEQ ID NO: 299.

[0451] In some embodiments, the intracellular signaling domain of the CD19 CAR is a T-cell receptor CD3zeta signaling domain comprising the amino acid sequence of SEQ ID NO: 467 and when the co-stimulatory domain is present, the co-stimulatory domain has an amino acid sequence selected from SEQ ID NOs: 233, 228-232, and 234-334.

[0452] In some embodiments, the transmembrane domain is derived from any of the members of the group consisting of:

[0453] (a) a molecule selected from the group consisting of CD8α, CD4, CD5, CD8, CD8α, CD9, CD16, CD22, CD33, CD28, CD37, CD45, CD64, CD80, CD86, CD148, DAP 10, EpoRI, GITR, LAG3, ICOS, Her2, OX40 (CD134), 4-1BB (CD137), CD152, CD154, PD-1, or CTLA-4

[0454] (b) a transmembrane region of an alpha, beta or zeta chain of a T-cell receptor;

[0455] (c) the CD3 epsilon chain of a T-cell receptor; and

[0456] (d) an immunoglobulin selected from IgG1, IgD, IgG4, and an IgG4 Fc region.

[0457] In some embodiments, the transmembrane domain comprises an amino acid sequence selected from the group consisting of SEQ ID NOs: 369, 335-368, 370-385 and 697-707.

[0458] In some embodiments, the CAR further comprises a hinge region near the transmembrane domain, said hinge region comprising an amino acid sequence selected from the group consisting of SEQ ID NOs: 400, 386-399, and 401-464.

[0459] In some embodiments, the SRE is responsive to or interacts with at least one stimulus.

[0460] In some embodiments, the stimulus is Trimethoprim (TMP) or Methotrexate (MTX).

[0461] In some embodiments, (a) the effector module is selected from the group consisting of SEQ ID NOs: 1121, 1123, 1129, 1131, 1133, 1135, 1137, 1139, and 1141; and (b) the CD19 CAR is selected from the group consisting of SEQ ID NOs: 1120, 1122, 1128, 1130, 1132, 1134, 1136, 1138, and 1140.

[0462] In some embodiments, the cell comprises at least one recombinant protein comprising an amino acid sequence selected from the group consisting of SEQ ID NOs: 1127, 1125, 1126, 1082, 1118, 1119, 1124, and 1127.

[0463] In some embodiments, the cell is a T-cell.

[0464] In some embodiments, the invention comprises a nucleic acid molecule, comprising:

[0465] (1) a first polynucleotide, optionally a first expression cassette, encoding a first recombinant protein comprising a stimulus response element (SRE) linked to at least one of a cytokine, a cytokine-cytokine receptor fusion protein, and a CD19 CAR; wherein the SRE comprises a DD, wherein said DD is derived from a parent protein or a mutant protein having one or more amino acid mutations in the amino acid sequence of the DD compared to said parent protein, wherein the parent protein is selected from the group consisting of:
[0466] (i) human DHFR (hDHFR) (SEQ ID NO: 1);
[0467] (ii) E. coli DHFR (ecDHFR) (SEQ ID NO: 2); and
[0468] (iii) human protein FKBP (SEQ ID Nos: 3 or 1087); and

[0469] (2) optionally, a second polynucleotide, optionally a second expression cassette, encoding a second recombinant protein comprising a CD19 chimeric antigen receptor (CD19 CAR).

[0470] In some embodiments, the first and second polynucleotides, optionally the first and second expression cassettes, are operably linked to the same or different promoters.

[0471] In some embodiments, the CD19 CAR is under control of the SRE.

[0472] In some embodiments, the CD19 CAR is not under control of the SRE.

[0473] In some embodiments, the first polynucleotide and the optional second polynucleotide encode a recombinant protein as set forth in any one of claims 1-30.

[0474] In some embodiments, the nucleic acid molecule is isolated.

[0475] In some embodiments, the invention comprises a vector comprising a nucleic acid molecule described herein.

[0476] In some embodiments, the vector is a plasmid, lentiviral vector, retroviral vector, adenoviral vector, or adeno-associated viral vector.

[0477] In some embodiments, the vector is integrase defective.

[0478] In some embodiments, the invention comprises a T-cell, comprising the nucleic acid molecule or a vector described herein.

[0479] In some embodiments, the T-cell is a CD4+ or CD8+ T-cell.

[0480] In some embodiments, the T-cell is a human T-cell.

[0481] In some embodiments, the T-cell is isolated.

[0482] In some embodiments, the invention comprises a pharmaceutical composition, comprising the cell or T-cell described herein and a pharmaceutically acceptable carrier.

[0483] In some embodiments, the invention comprises a method of producing a genetically engineered T-cell, comprising:

[0484] introducing into a T-cell:

[0485] (i) a first polynucleotide encoding a stimulus response element (SRE) linked to at least one recombinant protein selected from: a cytokine, a cytokine-cytokine receptor fusion protein, and a CD19 CAR; wherein the SRE comprises a DD, wherein said DD is derived from a parent protein or a mutant protein having one or more amino acid mutations in the amino acid sequence of the DD compared to said parent protein, wherein the parent protein is selected from the group consisting of:
[0486] (i) human DHFR (hDHFR) (SEQ ID NO: 1);
[0487] (ii) E. coli DHFR (ecDHFR) (SEQ ID NO: 2); and
[0488] (iii) human protein FKBP (SEQ ID NOs: 3 or 1087); and

[0489] (ii) optionally a second polynucleotide encoding a CD19 chimeric antigen receptor (CAR);

[0490] wherein the first polynucleotide encodes the at least one cytokine, cytokine-cytokine receptor fusion protein, and CD19 CAR, and at least one of the at least one cytokine, cytokine-cytokine receptor fusion protein, and CD19 CAR encoded by the first polynucleotide is under control of the SRE.

[0491] In some embodiments, the invention comprises a method of regulating expression of an immunotherapeutic agent in a genetically engineered T-cell, comprising introducing into a T-cell, a first polynucleotide encoding a stimulus response element (SRE) linked to at least one recombinant protein selected from: a cytokine, a cytokine-cytokine receptor fusion protein, and a CD19 chimeric antigen receptor (CD19 CAR); wherein the SRE comprises a DD, wherein said DD is derived from a parent protein or a mutant protein having one or more amino acid mutations in the amino acid sequence of the DD compared to said parent protein, wherein the parent protein is selected from the group consisting of:

[0492] (i) human DHFR (hDHFR) (SEQ ID NO: 1);

[0493] (ii) E. coli DHFR (ecDHFR) (SEQ ID NO: 2); and

[0494] (iii) human protein FKBP (SEQ ID NOs: 3 or 1087); and optionally a second polynucleotide encoding a CD19 chimeric antigen receptor (CAR);

[0495] wherein the DD is stabilized in the presence of a stimulus and enables expression of the at least one cytokine, cytokine-cytokine receptor fusion protein, and a CD19 CAR, and wherein expression of the at least one cytokine, cytokine-cytokine receptor fusion protein, and a CD19 CAR in the T-cell is significantly increased in the presence of the stimulus as compared to expression of the at least one cytokine, cytokine-cytokine receptor fusion protein and a CD19 CAR in the absence of the stimulus.

### Methods of CD19 Antibody Development and Characterization

[0496] In some embodiments, the present invention provides methods of producing CD19 antibodies, antibody fragments or variants. Such methods may include the steps of: (1) preparing a composition with CD19, (2) contacting a library of antibodies or antibody fragments or variable with the composition, and (3) identifying one or more CD19 antibodies. Also, provided herein are methods for identifying FMC63-distinct CD19 antibodies, antibody fragments or variable.

[0497] The present invention also provides methods for identifying anti-CD19 scFvs. The identifying method may comprise (a) expressing CD19 in a cell line, said cell line having none or low levels of endogenously expressed CD19; (b) incubating the cells expression CD19 of (a) with phages of a phage library that has been pre-cleared of non-specific binding phages; (c) recovering from the incubated mixture of (b) phages bound to CD19 expressed from the cell line of (a) thereby identifying anti-CD19 scFv from the bound phages.

[0498] Also provided herein are methods for identifying FMC63-distinct binding domains and using CD19 antigens in which the FMC63 binding epitope is masked or absent. In some embodiments, the FMC63 binding domain may be included in the payloads and effector modules of the invention.

[0499] In some embodiments, the present invention provides methods of identifying CD19 scFvs. Such methods may involve screening phagemid libraries for CD19 scFvs. Phagemid libraries expressing recombinant scFvs associated with the surface of bacteria or bacteriophages are useful in the present inventions. Phagemid libraries may be generated by PCR implication of the polynucleotides encoding the heavy chain and the kappa light chain of the immunoglobulin IgM and infecting Cre recombinase positive bacteria with the vectors containing the PCR products at a high multiplicity of infection (MOI). The high MOI results in bacteria containing multiple phagemids, each of which encodes a different VH and VL genes, which can be recombined by the Cre recombinase. The resulting library that may be generated by recombination is approximately 10⁸ unique scFvs. In some instances, libraries of CD19 scFvs formatted into chimeric antigen receptor constructs may be screened to identify CD19scFvs useful in the present invention.

[0500] In some embodiments, scFvs immunologically specific to CD19 may be identified using cells that ectopically express full length, a fragment or a portion of CD19. Cell lines with low endogenous CD19 expression may be selected for ectopic expression. In some embodiments, the CD19 may be a naturally occurring isoform of human CD19.

[0501] In some embodiments, fusion proteins comprising the extracellular domains of CD19 (i.e. exon 1-exon 4) fused to the Fc region of human IgG1 (CD19sIg) are utilized to identify CD19 specific scFvs. Such fusion proteins have been described by Oliveira et al (2013) Journal of Translational Medicine 11:23; the contents of which are incorporated herein by reference in their entirety.

[0502] Also, provided herein are methods to identify FMC63-distinct scFvs, which include scFvs that are immunologically specific to and bind to an epitope of the CD19 antigen that is different or unlike the epitope of CD19 antigen that is bound by FMC63. In some embodiments, FMC63-distinct scFvs are identified by screening the scFv library with a complex consisting of human CD19 bound to FMC63. The CD19 of Rhesus macaque (Macaca mulatta) herein referred to as Rhesus CD19, bears 88% homology to the human CD19. Despite this high degree of homology, the Rhesus CD19 is not recognized by FMC63, indicating that the FMC63 epitope is in the region of human CD19 that is non-homologous to Rhesus CD19. Thus, in some embodiments, Rhesus CD19 may be used to screen scFv libraries for FMC63-distinct scFvs. Mutations in the region of Rhesus CD19 that is non-homologous to the human CD19 have been previously utilized to identify residues of human CD19 that confer binding to FMC63 (Sommermeyer et al. (2017) Leukemia February 16. doi: 10.1038/leu. 2017.57). In some embodiments, the mutational analysis described by Sommermeyer et al. may be utilized to design human CD19 mutants that are unable to bind to FMC63. Such mutants may include human CD19 (H218R, A237D, M243V, E244D, P250T) and human CD19 (H218R, A237D) and may be utilized to screen scFv libraries for FMC63-distinct scFvs. Sotillo et al have identified a splice variant of human CD19 lacking exon 2 in cancer patients (Sotillo et al. (2015) Cancer Discov. 2015 Dec. 5(12):1282-95). The splice variant lacking exon 2 is not recognized by FMC63 and may also be used to screen scFv libraries for FMC63-distinct scFvs.

[0503] CD19 IgG fusion molecules generated by fusing the Fc region of human IgG1 with the human CD19-complete extracellular domains, i.e., exons 1˜4 (CD19sIgG1-4) or extracellular domains lacking exon 2, i.e., exons 1, 3 and 4 (CD19sIgG1,3,4) may also be utilized to screen scFv libraries for FMC63-distinct scFvs.

### III. Pharmaceutical Compositions and Formulations

[0504] The present invention further provides pharmaceutical compositions comprising one or more biocircuits, effector modules, human administration, preparations should meet sterility, pyrogenicity, general safety and purity standards as required by FDA Office of Biological Standards.

[0505] A pharmaceutical composition and formulation in accordance with the invention may be prepared, packaged, and/or sold in bulk, as a single unit dose, and/or as a plurality of single unit doses. As used herein, a “unit dose” is discrete amount of the pharmaceutical composition comprising a predetermined amount of the active ingredient. The amount of the active ingredient is generally equal to the dosage of the active ingredient which would be administered to a subject and/or a convenient fraction of such a dosage such as, for example, one-half or one-third of such a dosage.

[0506] The compositions of the present invention may be formulated in any manner suitable for delivery. The formulation may be, but is not limited to, nanoparticles, poly (lactic-co-glycolic acid) (PLGA) microspheres, lipidoids, lipoplex, liposome, polymers, carbohydrates (including simple sugars), cationic lipids and combinations thereof.

[0507] In one embodiment, the formulation is a nanoparticle which may comprise at least one lipid. The lipid may be selected from, but is not limited to, DLin-DMA, DLin-K-DMA, 98N12-5, C₁₂-200, DLin-MC3-DMA, DLin-KC2-DMA, DODMA, PLGA, PEG, PEG-DMG and PEGylated lipids. In another aspect, the lipid may be a cationic lipid such as, but not limited to, DLin-DMA, DLin-D-DMA, DLin-MC3-DMA, DLin-KC2-DMA and DODMA.

[0508] For polynucleotides of the invention, the formulation may be selected from any of those taught, for example, in International Application PCT/US2012/069610, the contents of which are incorporated herein by reference in its entirety.

[0509] Relative amounts of the active ingredient, the pharmaceutically acceptable excipient or inert ingredient, and/or any additional ingredients in a pharmaceutical composition in accordance with the invention will vary, depending upon the identity, size, and/or condition of the subject treated and further depending upon the route by which the composition is to be administered. By way of example, the composition may comprise between 0.1 and 100, e.g., between 0.5 and 50, between 1-30, between 5-80, at least 80 (w/w) active ingredient.

[0510] Efficacy of treatment or amelioration of disease can be assessed, for example by measuring disease progression, disease remission, symptom severity, reduction in pain, quality of life, dose of a medication required to sustain a treatment effect, level of a disease marker or any other measurable parameter appropriate for a given disease being treated or targeted for prevention. It is well within the ability of one skilled in the art to monitor efficacy of treatment or prevention by measuring any one of such parameters, or any combination of parameters. In connection with the administration of compositions of the present invention, “effective against” for example a cancer, indicates that administration in a clinically appropriate manner results in a beneficial effect for at least a statistically significant fraction of patients, such as an improvement of symptoms, a cure, a reduction in disease load, reduction in tumor mass or cell numbers, extension of life, improvement in quality of life, or other effect generally recognized as positive by medical doctors familiar with treating the particular type of cancer.

[0511] A treatment or preventive effect is evident when there is a statistically significant improvement in one or more parameters of disease status, or by a failure to worsen or to develop symptoms where they would otherwise be anticipated. As an example, a favorable change of at least 10 in a measurable parameter of disease, and preferably at least 20, 30, 40, 50 or more can be indicative of effective treatment. Efficacy for a given composition or formulation of the present invention can also be judged using an experimental animal model for the given disease as known in the art. When using an experimental animal model, efficacy of treatment is evidenced when a statistically significant change is observed.

### IV. Applications

[0512] In one aspect of the present invention, methods for reducing a tumor volume or burden are provided. The methods comprise administering a pharmaceutically effective amount of a pharmaceutical composition comprising at least one biocircuit system, effector module, DD, and/or payload of interest (i.e., an immunotherapeutic agent), at least one vector, or cells to a subject having a tumor. The biocircuit system and effector module having any immunotherapeutic agent as described herein may be in forms of a polypeptide, or a polynucleotide such as mRNA, or a viral vector comprising the polynucleotide, or a cell modified to express the biocircuit, effector module, DD, and payload of interest (i.e., immunotherapeutic agent).

[0513] In another aspect of the present invention, methods for inducing an anti-tumor immune response in a subject are provided. The methods comprise administering a pharmaceutically effective amount of a pharmaceutical composition comprising at least one biocircuit system, effector module, DD, and/or payload of interest (i.e., an immunotherapeutic agent), at least one vector, or cells to a subject having a tumor. The biocircuit and effector module having any immunotherapeutic agent as described herein may be in forms of a polypeptide, or a polynucleotide such as mRNA, or a viral vector comprising the polynucleotide, or a cell modified to express the biocircuit, effector module, DD, and payload of interest (i.e., immunotherapeutic agent).

[0514] The methods, according to the present invention, may be adoptive cell transfer (ACT) using genetically engineered cells such as immune effector cells of the invention, cancer vaccines comprising biocircuit systems, effector modules, DDs, payloads of interest (i.e., immunotherapeutic agents) of the invention, or compositions that manipulate the tumor immunosuppressive microenvironment, or the combination thereof. These treatments may be further employed with other cancer treatment such as chemotherapy and radiotherapy.

### 1. Adoptive Cell Transfer (Adoptive Immunotherapy)

[0515] In some embodiments, cells which are genetically modified to express at least one biocircuit system, effector module, DD, and/or payload of interest (immunotherapeutic agent) may be used for adoptive cell therapy (ACT). As used herein, Adoptive cell transfer refers to the administration of immune cells (from autologous, allogenic or genetically modified hosts) with direct anticancer activity. ACT has shown promise in clinical application against malignant and infectious disease. For example, T cells genetically engineered to recognize CD19 have been used to treat follicular B cell lymphoma (Kochenderfer et al., Blood, 2010, 116:4099-4102; and Kochenderfer and Rosenberg, Nat Rev Clin Oncol., 2013, 10(5): 267-276) and ACT using autologous lymphocytes genetically-modified to express anti-tumor T cell receptors has been used to treat metastatic melanoma (Rosenberg and Dudley, Curr. Opin. Immunol. 2009, 21: 233-240).

[0516] According to the present invention, the biocircuits and systems may be used in the development and implementation of cell therapies such as adoptive cell therapy. Certain effector modules useful in cell therapy are given in FIGS. 7-12 in International Publication No. WO2017/180587, the contents of which are herein incorporated by reference in their entirety. The biocircuits, their components, effector modules and their SREs and payloads may be used in cell therapies to effect CAR therapies, in the manipulation or regulation of TILs, in allogeneic cell therapy, in combination T cell therapy with other treatment lines (e.g. radiation, cytokines), to encode engineered TCRs, or modified TCRs, or to enhance T cells other than TCRs (e.g. by introducing cytokine genes, genes for the checkpoint inhibitors PD1, CTLA4).

[0517] Provided herein are methods for use in adoptive cell therapy. The methods involve preconditioning a subject in need thereof, modulating immune cells with SRE, biocircuits and compositions of the present invention, administering to a subject, engineered immune cells expressing compositions of the invention and the successful engraftment of engineered cells within the subject.

[0518] In some embodiments, SREs, biocircuits and compositions of the present invention may be used to minimize preconditioning regimens associated with adoptive cell therapy. As used herein “preconditioning” refers to any therapeutic regimen administered to a subject to improve the outcome of adoptive cell therapy. Preconditioning strategies include but are not limited to total body irradiation and/or lymphodepleting chemotherapy. Adoptive therapy clinical trials without preconditioning have failed to demonstrate any clinical benefit, indicating its importance in ACT. Yet, preconditioning is associated with significant toxicity and limits the subject cohort that is suitable for ACT. In some instances, immune cells for ACT may be engineered to express cytokines such as IL12 and IL15 as payload using SREs of the present invention to reduce the need for preconditioning (Pengram et al. (2012) Blood 119 (18): 4133-41; the contents of which are incorporated by reference in their entirety).

[0519] In some embodiments, immune cells for ACT may be dendritic cells, T cells such as CD8+ T cells and CD4+ T cells, natural killer (NK) cells, NK T cells, Cytotoxic T lymphocytes (CTLs), tumor infiltrating lymphocytes (TILs), lymphokine activated killer (LAK) cells, memory T cells, regulatory T cells (Tregs), helper T cells, cytokine-induced killer (CIK) cells, and any combination thereof. In other embodiments, immune stimulatory cells for ACT may be generated from embryonic stem cell (ESC) and induced pluripotent stem cell (iPSC). In some embodiments, autologous or allogeneic immune cells are used for ACT.

[0520] In some embodiments, cells used for ACT may be T cells engineered to express CARs comprising an antigen-binding domain specific to an antigen on tumor cells of interest. In other embodiments, cells used for ACT may be NK cells engineered to express CARs comprising an antigen-binding domain specific to an antigen on tumor cells of interest. In addition to adoptive transfer of genetically modified T cells (e.g., CART cells) for immunotherapy, alternate types of CAR-expressing leukocytes, either alone, or in combination with CAR T cells may be used for adoptive immunotherapy. In one example, a mixture of T cells and NK cells may be used for ACT. The expression level of CARs in T cells and NK cells, according to the present invention, is tuned and controlled by a small molecule that binds to the DD(s) operably linked to the CAR in the effector module.

[0521] In some embodiments, the CARs of the present invention may be placed under the transcriptional control of the T cell receptor alpha constant (TRAC) locus in the T cells to achieve uniform CAR expression while enhancing T cell potency. The TRAC locus may be disrupted using the CRISPR/Cas 9, zinc finger nucleases (ZFNs), TALENs followed by the insertion of the CAR construct. Methods of engineering CAR constructs directed to the TRAC locus are described in Eyquem J. et al (2017) Nature. 543(7643):113-117 (the contents of which are incorporated herein by reference in their entirety).

[0522] In some embodiments, NK cells engineered to express the present compositions may be used for ACT. NK cell activation induces perforin/granzyme-dependent apoptosis in target cells. NK cell activation also induces cytokine secretion such as IFN γ, TNF-α and GM-CSF. These cytokines enhance the phagocytic function of macrophages and their antimicrobial activity and augment the adaptive immune response via up-regulation of antigen presentation by antigen presenting cells such as dendritic cells (DCs) (Reviewed by Vivier et al., Nat. Immunol., 2008, 9(5): 503-510).

[0523] Other examples of genetic modification may include the introduction of chimeric antigen receptors (CARs) and the down-regulation of inhibitory NK cell receptors such as NKG2A.

[0524] NK cells may also be genetically reprogrammed to circumvent NK cell inhibitory signals upon interaction with tumor cells. For example, using CRISPR, ZFN, or TALEN to genetically modify NK cells to silence their inhibitory receptors may enhance the anti-tumor capacity of NK cells.

[0525] Immune cells can be isolated and expanded ex vivo using a variety of methods known in the art. For example, methods of isolating and expanding cytotoxic T cells are described in U.S. Pat. Nos. 6,805,861 and 6,531,451; US Patent Publication NO. US20160348072A1 and International Patent Publication NO. WO2016168595A1; the contents of each of which are incorporated herein by reference in their entirety. Isolation and expansion of NK cells is described in US Patent Publication NO. US20150152387A1, U.S. Pat. No. 7,435,596; and Oyer, J. L. (2016). Cytotherapy. 18(5):653-63; the contents of each of which are incorporated by reference herein in its entirety. Specifically, human primary NK cells may be expanded in the presence of feeder cells e.g. a myeloid cell line that has been genetically modified to express membrane bound IL15, IL21, IL12 and 4-1BBL.

[0526] In some instances, sub populations of immune cells may be enriched for ACT. Methods for immune cell enrichment are taught in International Patent Publication NO. WO2015039100A1. In another example, T cells positive for B and T lymphocyte attenuator marker BTLA) may be used to enrich for T cells that are anti-cancer reactive as described in U.S. Pat. No. 9,512,401 (the content of each of which are incorporated herein by reference in their entirety).

[0527] In some embodiments, immune cells for ACT may be depleted of select sub populations to enhance T cell expansion. For example, immune cells may be depleted of Foxp3+T lymphocytes to minimize the ant-tumor immune response using methods taught in US Patent Publication NO. US 20160298081A1; the contents of which are incorporated by reference herein in their entirety.

[0528] In some embodiments, activation and expansion of T cells for ACT is achieved antigenic stimulation of a transiently expressed Chimeric Antigen Receptor (CAR) on the cell surface. Such activation methods are taught in International Patent NO. WO2017015427, the content of which are incorporated herein by reference in their entirety.

[0529] In some embodiments, immune cells may be activated by antigens associated with antigen presenting cells (APCs). In some embodiments, the APCs may be dendritic cells, macrophages or B cells that antigen specific or nonspecific. The APCs may autologous or homologous in their organ. In some embodiments, the APCs may be artificial antigen presenting cells (aAPCs) such as cell based aAPCs or acellular aAPCs. Cell based aAPCs are may be selected from either genetically modified allogeneic cells such as human erythroleukemia cells or xenogeneic cells such as murine fibroblasts and Drosophila cells. Alternatively, the APCs maybe be acellular wherein the antigens or costimulatory domains are presented on synthetic surfaces such as latex beads, polystyrene beads, lipid vesicles or exosomes.

[0530] In some embodiments, cells of the invention, specifically T cells may be expanded using artificial cell platforms. In one embodiment, the mature T cells may be generated using artificial thymic organoids (ATOS) described by Seet C S et al. 2017. Nat Methods. 14, 521-530 (the contents of which are incorporated herein by reference in their entirety). ATOs are based on a stromal cell line expressing delta like canonical notch ligand (DLL1). In this method, stromal cells are aggregated with hematopoietic stem and progenitor cells by centrifugation and deployed on a cell culture insert at the air—fluid interface to generate organoid cultures. ATO-derived T cells exhibit naive phenotypes, a diverse T cell receptor (TCR) repertoire and TCR-dependent function.

[0531] In some embodiments, adoptive cell therapy is carried out by autologous transfer, wherein the cells are derived from a subject in need of a treatment and the cells, following isolation and processing are administered to the same subject. In other instances, ACT may involve allogenic transfer wherein the cells are isolated and/or prepared from a donor subject other than the recipient subject who ultimately receives cell therapy. The donor and recipient subject may be genetically identical, or similar or may express the same HLA class or subtype.

[0532] In some embodiments, the multiple immunotherapeutic agents introduced into the immune cells for ACT (e.g., T cells and NK cells) may be controlled by the same biocircuit system. In one example, a cytokine such as IL12 and a CAR construct such as CD19 CAR are linked to the same hDHFR destabilizing domain. The expression of IL12 and CD19 CAR is tuned using TMP simultaneously. In other embodiments, the multiple immunotherapeutic agents introduced into the immune cells for ACT (e.g., T cells and NK cells) may be controlled by different biocircuit systems. In one example, a cytokine such as IL12 and a CAR construct such as CD19 CAR are linked to different DDs in two separate effector modules, thereby can be tuned separately using different stimuli. In another example, a suicide gene and a CAR construct may be linked to two separate effector modules.

[0533] Following genetic modulation using SREs, biocircuits and compositions of the invention, cells are administered to the subject in need thereof. Methods for administration of cells for adoptive cell therapy are known and may be used in connection with the provided methods and compositions. For example, adoptive T cell therapy methods are described, e.g., in US Patent Application Publication No. 2003/0170238 to Gruenberg et al; U.S. Pat. No. 4,690,915 to Rosenberg; Rosenberg (2011) Nat Rev Clin Oncol. 8(10):577-85). See, e.g., Themeli et al. (2013) Nat Biotechnol. 31(10): 928-933; Tsukahara et al. (2013) Biochem Biophys Res Commun 438(1): 84-9; Davila et al. (2013) PLoS ONE 8(4): e61338; the contents of each of which are incorporated herein by reference in their entirety.

[0534] In some embodiments, immune cells for ACT may be modified to express one or more immunotherapeutic agents which facilitate immune cells activation, infiltration, expansion, survival and anti-tumor functions. The immunotherapeutic agents may be a second CAR or TCR specific to a different target molecule; a cytokine or a cytokine receptor; a chimeric switch receptor that converts an inhibitory signal to a stimulatory signal; a homing receptor that guides adoptively transferred cells to a target site such as the tumor tissue; an agent that optimizes the metabolism of the immune cell; or a safety switch gene (e.g., a suicide gene) that kills activated T cells when a severe event is observed after adoptive cell transfer or when the transferred immune cells are no-longer needed.

[0535] In some embodiments, immune cells used for adoptive cell transfer can be genetically manipulated to improve their persistence, cytotoxicity, tumor targeting capacity, and ability to home to disease sites in vivo, with the overall aim of further improving upon their capacity to kill tumors in cancer patients. One example is to introduce effector modules of the invention comprising cytokines such as gamma-cytokines (IL2 and IL15) into immune cells to promote immune cell proliferation and survival. Transduction of cytokine genes (e.g., gamma-cytokines IL2 and IL15) into cells will be able to propagate immune cells without addition of exogenous cytokines and cytokine expressing NK cells have enhanced tumor cytotoxicity.

[0536] In some embodiments, biocircuits, their components, SREs or effector modules may be utilized to prevent T cell exhaustion. As used herein, “T cell exhaustion” refers to the stepwise and progressive loss of T cell function caused by chronic T cell activation. T cell exhaustion is a major factor limiting the efficacy of antiviral and antitumor immunotherapies. Exhausted T cells have low proliferative and cytokine producing capabilities concurrent with high rates of apoptosis and high surface expression of multiple inhibitory receptors. T cell activation leading to exhaustion may occur either in the presence or absence of the antigen.

[0537] In some embodiments, the biocircuits, and their components may be utilized to prevent T cell exhaustion in the context of Chimeric Antigen Receptor-T cell therapy (CAR-T). In this context, exhaustion in some instances, may be caused by the oligomerization of the scFvs of the CAR on the cell surface which leads to continuous activation of the intracellular domains of the CAR. As a non-limiting example, CARs of the present invention may include scFvs that are unable to oligomerize. As another non-limiting example, CARs that are rapidly internalized and re-expressed following antigen exposure may also be selected to prevent chronic scFv oligomerization on cell surface. In one embodiment, the framework region of the scFvs may be modified to prevent constitutive CAR signaling (Long et al. 2014. Cancer Research. 74(19) S1; the contents of which are incorporated by reference in their entirety). Tunable biocircuit systems of the present invention may also be used to regulate the surface expression of the CAR on the T cell surface to prevent chronic T cell activation. The CARs of the invention may also be engineered to minimize exhaustion. As a non-limiting example, the 41-BB signaling domain may be incorporated into CAR design to ameliorate T cell exhaustion. In some embodiments, any of the strategies disclosed by Long H A et al. may be utilized to prevent exhaustion (Long A H et al. (2015) Nature Medicine 21, 581-590; the contents of which are incorporated herein by reference in their entirety).

[0538] In some embodiments, the tunable nature of the biocircuits of the present invention may be utilized to reverse human T cell exhaustion observed with tonic CAR signaling. Reversibly silencing the biological activity of adoptively transferred cells using compositions of the present invention may be used to reverse tonic signaling which, in turn, may reinvigorate the T cells. Reversal of exhaustion may be measured by the downregulation of multiple inhibitory receptors associated with exhaustion.

[0539] In some embodiments, T cell metabolic pathways may be modified to diminish the susceptibility of T cells to exhaustion. Metabolic pathways may include, but are not limited to glycolysis, urea cycle, citric acid cycle, beta oxidation, fatty acid biosynthesis, pentose phosphate pathway, nucleotide biosynthesis, and glycogen metabolic pathways. As a non-limiting example, payloads that reduce the rate of glycolysis may be utilized to restrict or prevent T cell exhaustion (Long et al. Journal for Immunotherapy of Cancer 2013, 1 (Suppl 1): P21; the contents of which are incorporated by reference in their entirety). In one embodiment, T cells of the present invention may be used in combination with inhibitors of glycolysis such as 2-deoxyglucose, and rapamycin.

[0540] In some embodiments, effector modules of the present invention, useful for immunotherapy may be placed under the transcriptional control of the T cell receptor alpha locus constant (TRAC) locus in the T cells. Eyquem et al. have shown that expression of the CAR from the TRAC locus prevents T cell exhaustion and the accelerated differentiation of T cells caused by excessive T cell activation (Eyquem J. et al (2017) Nature. 543(7643):113-117; the contents of which are incorporated herein by reference in their entirety).

[0541] In some embodiments, payloads of the invention may be used in conjunction with antibodies or fragments that target T cell surface markers associated with T cell exhaustion. T-cell surface markers associated with T cell exhaustion that may be used include, but are not limited to, CTLA-1, PD-1, TGIT, LAG-3, 2B4, BTLA, TIM3, VISTA, and CD96.

[0542] In one embodiment, the payload of the invention may be a CD276 CAR (with CD28, 4-IBB, and CD3 zeta intracellular domains), that does not show an upregulation of the markers associated with early T cell exhaustion (see International patent publication No. WO2017044699; the contents of which are incorporated by reference in their entirety).

[0543] In some embodiments, the compositions of the present invention may be utilized to alter TIL (tumor infiltrating lymphocyte) populations in a subject. In one embodiment, any of the payloads described herein may be utilized to change the ratio of CD4 positive cells to CD8 positive populations. In some embodiments, TILs may be sorted ex vivo and engineered to express any of the cytokines described herein. Payloads of the invention may be used to expand CD4 and/or CD8 populations of TILs to enhance TIL mediated immune response.

[0544] The present invention provides method of inducing an immune response in a cell. As used herein the term “immune response” refers to the activity of the cells of the immune system in response to stimulus, or an antigen. In some embodiments, the antigen may be a cancer antigen. In some aspects, the methods of inducing an immune response may involve administering to the cell, a therapeutically effective amount of any of the compositions described herein. In one aspect, the method may involve administering the pharmaceutical compositions described herein. In one aspect, the method may involve administering the polynucleotides, vectors. In some embodiments, induction of the immune response occurs due to the expression and or function of the immunotherapeutic agents described herein. Methods of inducing immune response further may involve administering to the cell, an effective amount of the stimulus to tune the expression of the immunotherapeutic agent. In some embodiments, the immunotherapeutic agent is capable of inducing an immune response in response to the stimulus. The induction of the immune response may occur in a cell within a subject i.e. in vivo, ex vivo or in vitro. The induction of an immune response may be evaluated by measuring the release of cytokine such as IL2 and IFNγ from the cells. In some embodiments, the induction of an immune response may be measured by evaluating the cell markers such as but not limited to CD3, CD4, CD8, CD 14, CD20, CD11b, CD16, CD45 and HLA-DR, CD 69, CD28, CD44, IFN gamma, Granzyme, Tbet, pSTAT4, CD25, and ICOS using methods known in the art such as FACS. In some embodiments, Granzyme, Tbet, pSTAT4, CD25, and ICOS as described herein are also referred to as T cell activation markers. Examples of cell markers for antigen presenting cells include, but are not limited to, MHC class I, MHC Class II, CD40, CD45, B7-1, B7-2, IFN γ receptor and IL2 receptor, ICAM-1 and/or Fcγ receptor. Examples of cell surface markers for dendritic cells include, but are not limited to, MHC class I, MHC Class II, B7-2, CD18, CD29, CD31, CD43, CD44, CD45, CD54, CD58, CD83, CD86, CMRF-44, CMRF-56, DCIR and/or Dectin-1 and the like; while in some cases also having the absence of CD2, CD3, CD4, CD8, CD14, CD15, CD16, CD 19, CD20, CD56, and/or CD57. Examples of cell surface markers for NK cells include, but are not limited to, CCL3, CCL4, CCL5, Granulysin, Granzyme B, Granzyme K, IL10, IL22, IFNg, LAP, Perforin, and TNFa. In one some embodiments, the cell markers induces at least a 2-fold, 3-fold, 4-fold, 5-fold, 6-fold, 7-fold, 8-fold, 9-fold, 10-fold, 100-fold, 1000-fold.

[0545] In some embodiments, the polynucleotides may further comprise, at least one additional feature selected from, but not limited to, a promoter, a linker, a signal peptide, a tag, a cleavage site and a targeting peptide.

[0546] The present invention also provides vectors comprising polynucleotides described herein. In one aspect, the vector may be a viral vector. In some embodiments, the viral vector may be a retroviral vector, a lentiviral vector, a gamma retroviral vector, a recombinant AAV vector, an adeno viral vector, and an oncolytic viral vector.

[0547] The present invention also provides immune cells for adoptive cell transfer (ACT) which may express the compositions of the invention, the polynucleotides described herein. In one aspect, the immune cells may be infected or transfected with the vectors described herein. The immune cells for ACT may be selected from, but not limited to a CD8+ T cell, a CD4+ T cell, a helper T cell, a natural killer (NK) cell, a NKT cell, a cytotoxic T lymphocyte (CTL), a tumor infiltrating lymphocyte (TIL), a memory T cell, a regulatory T (Treg) cell, a cytokine-induced killer (CIK) cell, a dendritic cell, a human embryonic stem cell, a mesenchymal stem cell, a hematopoietic stem cell, or a mixture thereof.

[0548] In some embodiments, the immune cells may be autologous, allogeneic, syngeneic, or xenogeneic in relation to a particular individual subject.

[0549] The present invention provides methods for reducing a tumor volume or burden in a subject comprising contacting the subject with the immune cells of the invention. Also provided herein, is a method for inducing an anti-tumor immune response in a subject, comprising administering the immune cells of the system to the subject.

[0550] The tunable system and agent described herein may be a biocircuit system comprising at least one effector module that is responsive to at least one stimulus. The biocircuit system may be, but is not limited to, a destabilizing domain (DD) biocircuit system, a dimerization biocircuit system, a receptor biocircuit system, and a cell biocircuit system. These systems are further taught in co-owned U.S. Provisional Patent Application No. 62/320,864 filed Apr. 11, 2016, 62/466,596 filed Mar. 3, 2017 and the International Publication WO2017/180587 (the contents of each of which are herein incorporated by reference in their entirety).

[0551] The present invention provides compositions for inducing immune responses in a cell or a subject. In one embodiment, the compositions may include a first effector module. The effector module may comprise a first stimulus response element (SRE) operably linked to a first immunotherapeutic agent. In some aspects, the first effector module may be further operably linked to a second immunotherapeutic agent.

[0552] In some embodiments, the composition may comprise a first immunotherapeutic agent operably linked to a second immunotherapeutic agent.

[0553] In some embodiments, the first immunotherapeutic agent may be a cytokine or a cytokine receptor fusion protein.

[0554] In one embodiment, the first immunotherapeutic agent is a cytokine. In one aspect, the cytokine is IL12. The IL12 may be a fusion protein comprising a p40 subunit, a linker, and a p35 subunit.

[0555] In one aspect, the first immunotherapeutic agent may be a cytokine-cytokine receptor fusion polypeptide. The cytokine-cytokine receptor fusion polypeptide may include the whole or a portion of SEQ ID NO. 632; 855-1097 thereby generating an IL15-IL15 receptor fusion polypeptide.

[0556] In some embodiments, the second immunotherapeutic agent may be selected from but is not limited an scFv comprising at least 70% sequence identity to a sequence selected from the group consisting of SEQ ID NO. 1034-1036. In some embodiments, the first immunotherapeutic agent may be a chimeric antigen receptor comprising the scFv.

[0557] In some respects, the scFv may specifically bind a CD19 antigen. In one aspect, the SRE of the composition may be responsive to or interact with at least one stimulus.

[0558] In one aspect, the CAR may be selected from, but is not limited to a standard CAR, a split CAR, an off-switch CAR, an on-switch CAR, a first-generation CAR, a second-generation CAR, a third-generation CAR, or a fourth-generation CAR.

[0559] The chimeric antigen may further comprise a transmembrane domain; an intracellular signaling domain; and optionally, one or more co-stimulatory domains.

[0560] In some embodiments, the intracellular signaling domain of the CAR may be a signaling domain derived from T cell receptor CD3zeta. In some embodiments, the intracellular signaling domain may be selected from a cell surface molecule selected from the group consisting of FcR gamma, FcR beta, CD3 gamma, CD3 delta, CD3 epsilon, CD5, CD22, CD79a, CD79b, and CD66d. In one aspect, the CAR may include a co-stimulatory domain. In some embodiments, the co-stimulatory domain may be selected from the group consisting of 2B4, HVEM, ICOS, LAG3, DAP10, DAP12, CD27, CD28, 4-1BB (CD137), OX40 (CD134), CD30, CD40, ICOS (CD278), glucocorticoid-induced tumor necrosis factor receptor (GITR), lymphocyte function-associated antigen-1 (LFA-1), CD2, CD7, LIGHT, NKG2C, and B7-H3.

[0561] The co-stimulatory domain is present and is selected from the group consisting of 2B4, HVEM, ICOS, LAG3, DAP10, DAP12, CD27, CD28, 4-1BB (CD137), OX40 (CD134), CD30, CD40, ICOS (CD278), glucocorticoid-induced tumor necrosis factor receptor (GITR), lymphocyte function-associated antigen-1 (LFA-1), CD2, CD7, LIGHT, NKG2C, and B7-H3.

[0562] In some embodiments, the intracellular signaling domain of the CAR may be a T cell receptor CD3zeta signaling domain, which may comprise the amino acid sequence of SEQ ID NO. 299.

[0563] In some embodiments, T cell receptor CD3zeta signaling domain of the CAR, comprising the amino acid sequence of SEQ ID NO. 467 may further comprise at least one co-stimulatory domain. The co-stimulatory domain may comprise an amino acid sequence of SEQ ID NOs. 228-334.

[0564] In one embodiment, the transmembrane domain of the CAR may be derived from a transmembrane region of an alpha, beta or zeta chain of a T-cell receptor. In one aspect, the transmembrane domain may be derived from the CD3 epsilon chain of a T-cell receptor. In one embodiment, the transmembrane domain may be derived from a molecule selected from CD4, CD5, CD8, CD8α, CD9, CD16, CD22, CD33, CD28, CD37, CD45, CD64, CD80, CD86, CD148, DAP 10, EpoRI, GITR, LAG3, ICOS, Her2, OX40 (CD134), 4-1BB (CD137), CD152, CD154, PD-1, or CTLA-4. In another embodiment, the transmembrane domain may be derived from an immunoglobulin selected from IgG1, IgD, IgG4, and an IgG4 Fc region. In one aspect, the transmembrane domain may comprise an amino acid sequence selected from the group consisting of any of SEQ ID NOs. 335-385 and 697-707.

[0565] In some embodiments, the CAR of the effector module may further comprise a hinge region near the transmembrane domain. In one aspect, the hinge region may comprise an amino acid sequence selected from the group consisting of any of SEQ ID NOs. 386-464.

[0566] In some embodiments, the SRE may comprise a destabilizing domain (DD). The DD may be derived from a parent protein or from a mutant protein having one, two, there, or more amino acid mutations compared to the parent protein. In some embodiments, the parent protein may be selected from, but is not limited to, human protein FKBP, comprising the amino acid sequence of SEQ ID NO. 3 and 1087; human DHFR (hDHFR), comprising the amino acid sequence of SEQ ID NO. 2; or E. coli DHFR (ecDHFR), comprising the amino acid sequence of SEQ ID NO. 1.

[0567] In one aspect, the parent protein is hDHFR and the DD comprises a mutant protein. The mutant protein may comprise a single mutation and may be selected from, but not limited to hDHFR (I17V), hDHFR (M1del, I17A), hDHFR (F59S), hDHFR (N65D), hDHFR (K81R), hDHFR (A107V), hDHFR (Y1220, hDHFR (N127Y), hDHFR (M140I), hDHFR (K185E), hDHFR (N186D), and hDHFR (M140I). In some embodiments, the mutant protein may comprise two mutations and may be selected from, but not limited to, hDHFR (M1del, N127Y), hDHFR (M1del, I17V), hDHFR (M1del, Y122I), hDHFR (M1del, K185E), hDHFR (C7R, Y163C), hDHFR (A10V, H88Y), hDHFR (Q36K, Y122I), hDHFR (M53T, R138I), hDHFR (T57A, I72A), hDHFR (E63G, I176F), hDHFR (G21T, Y122I), hDHFR (L74N, Y122I), hDHFR (V75F, Y122I), hDHFR (L94A, T147A), DHFR (V121A, Y22I), hDHFR (Y122I, A125F), hDHFR (H131R, E144G), hDHFR (T137R, F143L), hDHFR (Y178H, E18IG), and hDHFR (Y183H, K185E), hDHFR (E162G, I176F)

[0568] In some embodiments, the mutant may comprise three mutations and the mutant may be selected from hDHFR (M1del, 117A, Y122I), hDHFR (M1del, I17V, Y122I), hDHFR (M1del, Y122I, M140I), hDHFR (M1del, N127Y, Y122I), hDHFR (M1del, E162G, I176F), and hDHFR (M1del, H131R, E144G), hDHFR (M1del, Y122I, A125F), hDHFR (V9A, S93R, P150L), hDHFR (I8V, K133E, Y163C), hDHFR (L23S, V121A, Y157C), hDHFR (K19E, F89L, E181G), hDHFR (Q36F, N65F, Y122I), hDHFR (G54R, M140V, S168C), hDHFR (V110A, V136M, K177R), hDHFR (Q36F, Y122I, A125F), hDHFR (N49D, F59S, D153G), and hDHFR (G21E, I72V, I176T). In some embodiments, the mutant may comprise four or more mutations and the mutant may be selected from hDHFR (M1del, Q36F, Y122I, A125F), hDHFR (M1del, Y122I, H131R, E144G), hDHFR (M1del, E31D, F32M, V116I), hDHFR (M1del, Q36F, N65F, Y122I), hDHFR (V2A, R33G, Q36R, L100P, K185R), hDHFR (M1del, D22S, F32M, R33S, Q36S, N65S), hDHFR (I17N, L98S, K99R, M112T, E151G, E162G, E172G), hDHFR (G16S, I17V, F89L, D96G, K123E, M140V, D146G, K156R), hDHFR (K81R, K99R, L100P, E102G, N108D, K123R, H128R, D142G, F180L, K185E), hDHFR (R138G, D142G, F143S, K156R, K158E, E162G, V166A, K177E, Y178C, K185E, N186S), hDHFR (N14S, P24S, F35L, M53T, K56E, R92G, S93G, N127S, H128Y, F135L, F143S, L159P, L160P, E173A, F180L), hDHFR (F35L, R37G, N65A, L68S, K69E, R71G, L80P, K99G, G117D, L132P, I139V, M140I, D142G, D146G, E173G, D187G), hDHFR (L28P, N30H, M38V, V44A, L68S, N73G, R78G, A97T, K99R, A107T, K109R, D111N, L134P, F135V, T147A, I152V, K158R, E172G, V182A, E184R), hDHFR (V2A, I17V, N30D, E31G, Q36R, F59S, K69E, I72T, H88Y, F89L, N108D, K109E, V110A, 1115V, Y122D, L132P, F135S, M140V, E144G, T147A, Y157C, V170A, K174R, N186S), hDHFR (L100P, E102G, Q103R, P104S, E105G, N108D, V113A, W114R, Y122C, M126I, N127R, H128Y, L132P, F135P, I139T, F148S, F149L, I152V, D153A, D169G, V170A, I176A, K177R, V182A, K185R, N186S), and hDHFR (A10T, Q13R, N14S, N20D, P24S, N30S, M38T, T40A, K47R, N49S, K56R, I61T, K64R, K69R, I72A, R78G, E82G, F89L, D96G, N108D, M112V, W114R, Y122D, K123E, I139V, Q141R, D142G, F148L, E151G, E155G, Y157R, Q171R, Y183C, E184G, K185del, D187N).

[0569] In one aspect, the stimulus of the SRE may be Trimethoprim or Methotrexate.

[0570] The present invention also provides polynucleotides comprising the compositions of the invention.

[0571] In one embodiment, the compositions of the invention may include SEQ ID NO. 1124-1127, and 1142.

[0572] In some aspects, the compositions of the invention may include a first effector module, which may be selected from the group consisting of SEQ ID NO. 1121, 1123, 1129, 1131, 1133, 1135, 1137, 1139, and 1141; and a second immunotherapeutic agent which may be selected from the group consisting of SEQ ID NO. 1120, 1122, 1128, 1130, 1132, 1134, 1136, 1138, and 1140.

[0573] The present invention also provides polynucleotides encoding the compositions described herein; and vectors comprising polynucleotides described herein. Also provided herein, are the methods of reducing tumor burden and methods of inducing an immune response.

### 2. Cancer Vaccines

[0574] In some embodiments, biocircuits, effector modules, payloads of interest (immunotherapeutic agents), vectors, cells and compositions of the present invention may be used in conjunction with cancer vaccines.

[0575] In some embodiments, cancer vaccine may comprise peptides and/or proteins derived from tumor associated antigen (TAA). Such strategies may be utilized to evoke an immune response in a subject, which in some instances may be a cytotoxic T lymphocyte (CTL) response. Peptides used for cancer vaccines may also modified to match the mutation profile of a subject. For example, EGFR derived peptides with mutations matched to the mutations found in the subject in need of therapy have been successfully used in patients with lung cancer (Li F et al. (2016) Oncoimmunology. October 7; 5(12): e1238539; the contents of which are incorporated herein by reference in their entirety).

[0576] In one embodiment, cancer vaccines of the present invention may superagonist altered peptide ligands (APL) derived from TAAs. These are mutant peptide ligands deviate from the native peptide sequence by one or more amino acids, which activate specific CTL clones more effectively than native epitopes. These alterations may allow the peptide to bind better to the restricting Class I MHC molecule or interact more favorably with the TCR of a given tumor-specific CTL subset. APLs may be selected using methods taught in US Patent Publication NO. US20160317633A1, the contents of which are incorporated herein by reference in their entirety.

### 3. Combination Treatments

[0577] In some embodiments, it is desirable to combine compositions, vectors and cells of the invention for administration to a subject. Compositions of the invention comprising different immunotherapeutic agents may be used in combination for enhancement of immunotherapy.

[0578] In some embodiments, it is desirable to combine compositions of the invention with adjuvants, that can enhance the potency and longevity of antigen-specific immune responses. Adjuvants used as immunostimulants in combination therapy include biological molecules or delivery carriers that deliver antigens. As non-limiting examples, the compositions of the invention may be combined with biological adjuvants such as cytokines, Toll Like Receptors, bacterial toxins, and/or saponins. In other embodiments, the compositions of the present invention may be combined with delivery carriers. Exemplary delivery carriers include, polymer microspheres, immune stimulating complexes, emulsions (oil-in-water or water-in-oil), aluminum salts, liposomes or virosomes.

[0579] In some embodiments, immune effector cells modified to express biocircuits, effector modules, DDs and payloads of the invention may be combined with the biological adjuvants described herein. Dual regulation of CAR and cytokines and ligands to segregate the kinetic control of target-mediated activation from intrinsic cell T cell expansion. Such dual regulation also minimizes the need for pre-conditioning regimens in patients. As a non-limiting example, DD regulated CAR e.g. CD19 CAR may be combined with cytokines e.g. IL12 to enhance the anti-tumor efficacy of the CAR (Pegram H. J., et al. Tumor-targeted T cells modified to secrete IL12 eradicate systemic tumors without need for prior conditioning. Blood. 2012; 119:4133-41; the contents of each of which are incorporated herein by reference in their entirety). As another non-limiting example, Merchant et al. combined dendritic cell-based vaccinations with recombinant human IL7 to improve outcome in high-risk pediatric sarcomas patients (Merchant, M. S. et. al. Adjuvant immunotherapy to Improve Outcome in High-Risk Pediatric Sarcomas. Clin Cancer Res. 2016. 22(13):3182-91; the contents of each of which are incorporated herein by reference in their entirety).

[0580] In some embodiments, immune effector cells modified to express one or more antigen-specific TCRs or CARs may be combined with compositions of the invention comprising immunotherapeutic agents that convert the immunosuppressive tumor microenvironment.

[0581] In one aspect, effector immune cells modified to express CARs specific to different target molecules on the same cell may be combined. In another aspect, different immune cells modified to express the same CAR construct such as NK cells and T cells may be used in combination for a tumor treatment, for instance, a T cell modified to express a CD19 CAR may be combined with a NK cell modified to express the same CD19 CAR to treat B cell malignancy.

[0582] In other embodiments, immune cells modified to express CARs may be combined with checkpoint blockade agents.

[0583] In some embodiments, immune effector cells modified to expressed biocircuits, effector modules, DDs and payloads of the invention may be combined with cancer vaccines of the invention.

[0584] In some embodiments, methods of the invention may include combination of the compositions of the invention with other agents effective in the treatment of cancers, infection diseases and other immunodeficient disorders, such as anti-cancer agents. As used herein, the term “anti-cancer agent” refers to any agent which is capable of negatively affecting cancer in a subject, for example, by killing cancer cells, inducing apoptosis in cancer cells, reducing the growth rate of cancer cells, reducing the incidence or number of metastases, reducing tumor size, inhibiting tumor growth, reducing the blood supply to a tumor or cancer cells, promoting an immune response against cancer cells or a tumor, preventing or inhibiting the progression of cancer, or increasing the lifespan of a subject with cancer.

[0585] In some embodiments, anti-cancer agent or therapy may be a chemotherapeutic agent, or radiotherapy, immunotherapeutic agent, surgery, or any other therapeutic agent which, in combination with the present invention, improves the therapeutic efficacy of treatment.

[0586] In one embodiment, an effector module comprising a CD19 CAR may be used in combination with amino pyrimidine derivatives such as the Burkit's tyrosine receptor kinase (BTK) inhibitor using methods taught in International Patent Application NO. WO2016164580, the contents of which are incorporated herein by reference in their entirety.

[0587] In some embodiments, compositions of the present invention may be used in combination with immunotherapeutics other than the inventive therapy described herein, such as antibodies specific to some target molecules on the surface of a tumor cell.

[0588] Radiotherapeutic agents and factors include radiation and waves that induce DNA damage for example, γ-irradiation, X-rays, UV-irradiation, microwaves, electronic emissions, radioisotopes, and the like. Therapy may be achieved by irradiating the localized tumor site with the above described forms of radiations. It is most likely that all of these factors effect a broad range of damage DNA, on the precursors of DNA, the replication and repair of DNA, and the assembly and maintenance of chromosomes. Dosage ranges for X-rays range from daily doses of 50 to 200 roentgens for prolonged periods of time (3 to 4 weeks), to single doses of 2000 to 6000 roentgens. Dosage ranges for radioisotopes vary widely, and depend on the half-life of the isotope, the strength and type of radiation emitted, and the uptake by the neoplastic cells.

[0589] In some embodiments, the chemotherapeutic agent may be an immunomodulatory agent such as lenalidomide (LEN). Recent studies have demonstrated that lenalidomide can enhance antitumor functions of CAR modified T cells (Otahal et al., Oncoimmunology, 2015, 5(4): e1115940). Some examples of anti-tumor antibodies include tocilizumab, siltuximab.

[0590] Other agents may be used in combination with compositions of the invention may also include, but not limited to, agents that affect the upregulation of cell surface receptors and their ligands such as Fas/Fas ligand, DR4 or DR5/TRAIL and GAP junctions, cytostatic and differentiation agents, inhibitors of cell adhesion such as focal adhesion kinase (FAKs) inhibitors and Lovastatin, or agents that increase the sensitivity of the hyper proliferative cells to apoptotic inducers such as the antibody C225.

[0591] The combinations may include administering the compositions of the invention and other agents at the same time or separately. Alternatively, the present immunotherapy may precede or follow the other agent/therapy by intervals ranging from minutes, days, weeks to months.

### 4. Diseases

[0592] Provided in the present invention is a method of reducing a tumor volume or burden in a subject in need, the method comprising introducing into the subject a composition of the invention.

[0593] The present invention also provides methods for treating a cancer in a subject, comprising administering to the subject an effective amount of an immune effector cell genetically modified to express at least one effector module of the invention.

### Cancer

[0594] Various cancers may be treated with pharmaceutical compositions, biocircuits, biocircuit components, effector modules including their SREs or payloads of the present invention. As used herein, the term “cancer” refers to any of various malignant neoplasms characterized by the proliferation of anaplastic cells that tend to invade surrounding tissue and metastasize to new body sites and also refers to the pathological condition characterized by such malignant neoplastic growths. Cancers may be tumors or hematological malignancies, and include but are not limited to, all types of lymphomas/leukemias, carcinomas and sarcomas, such as those cancers or tumors found in the anus, bladder, bile duct, bone, brain, breast, cervix, colon/rectum, endometrium, esophagus, eye, gallbladder, head and neck, liver, kidney, larynx, lung, mediastinum (chest), mouth, ovaries, pancreas, penis, prostate, skin, small intestine, stomach, spinal marrow, tailbone, testicles, thyroid and uterus.

[0595] Types of carcinomas which may be treated with the compositions of the present invention include, but are not limited to, papilloma/carcinoma, choriocarcinoma, endodermal sinus tumor, teratoma, adenoma/adenocarcinoma, melanoma, fibroma, lipoma, leiomyoma, rhabdomyoma, mesothelioma, angioma, osteoma, chondroma, glioma, lymphoma/leukemia, squamous cell carcinoma, small cell carcinoma, large cell undifferentiated carcinomas, basal cell carcinoma and sinonasal undifferentiated carcinoma.

[0596] Types of carcinomas which may be treated with the compositions of the present invention include, but are not limited to, soft tissue sarcoma such as alveolar soft part sarcoma, angiosarcoma, dermatofibrosarcoma, desmoid tumor, desmoplastic small round cell tumor, extraskeletal chondrosarcoma, extraskeletal osteosarcoma, fibrosarcoma, hemangiopericytoma, hemangiosarcoma, Kaposi's sarcoma, leiomyosarcoma, liposarcoma, lymphangiosarcoma, lymphosarcoma, malignant fibrous histiocytoma, neurofibrosarcoma, rhabdomyosarcoma, synovial sarcoma, and Askin's tumor, Ewing's sarcoma (primitive neuroectodermal tumor), malignant hemangioendothelioma, malignant schwannoma, osteosarcoma, and chondrosarcoma.

[0597] As a non-limiting example, the carcinoma which may be treated may be Acute granulocytic leukemia, Acute lymphocytic leukemia, Acute myelogenous leukemia, Adenocarcinoma, Adenosarcoma, Adrenal cancer, Adrenocortical carcinoma, Anal cancer, Anaplastic astrocytoma, Angiosarcoma, Appendix cancer, Astrocytoma, Basal cell carcinoma, B-Cell lymphoma), Bile duct cancer, Bladder cancer, Bone cancer, Bowel cancer, Brain cancer, Brain stem glioma, Brain tumor, Breast cancer, Carcinoid tumors, Cervical cancer, Cholangiocarcinoma, Chondrosarcoma, Chronic lymphocytic leukemia, Chronic myelogenous leukemia, Colon cancer, Colorectal cancer, Craniopharyngioma, Cutaneous lymphoma, Cutaneous melanoma, Diffuse astrocytoma, Ductal carcinoma in situ, Endometrial cancer, Ependymoma, Epithelioid sarcoma, Esophageal cancer, Ewing sarcoma, Extrahepatic bile duct cancer, Eye cancer, Fallopian tube cancer, Fibrosarcoma, Gallbladder cancer, Gastric cancer, Gastrointestinal cancer, Gastrointestinal carcinoid cancer, Gastrointestinal stromal tumors, General, Germ cell tumor, Glioblastoma multiforme, Glioma, Hairy cell leukemia, Head and neck cancer, Hemangioendothelioma, Hodgkin lymphoma, Hodgkin's disease, Hodgkin's lymphoma, Hypopharyngeal cancer, Infiltrating ductal carcinoma, Infiltrating lobular carcinoma, Inflammatory breast cancer, Intestinal Cancer, Intrahepatic bile duct cancer, Invasive/infiltrating breast cancer, Islet cell cancer, Jaw cancer, Kaposi sarcoma, Kidney cancer, Laryngeal cancer, Leiomyosarcoma, Leptomeningeal metastases, Leukemia, Lip cancer, Liposarcoma, Liver cancer, Lobular carcinoma in situ, Low-grade astrocytoma, Lung cancer, Lymph node cancer, Lymphoma, Male breast cancer, Medullary carcinoma, Medulloblastoma, Melanoma, Meningioma, Merkel cell carcinoma, Mesenchymal chondrosarcoma, Mesenchymous, Mesothelioma, Metastatic breast cancer, Metastatic melanoma, Metastatic squamous neck cancer, Mixed gliomas, Mouth cancer, Mucinous carcinoma, Mucosal melanoma, Multiple myeloma, Nasal cavity cancer, Nasopharyngeal cancer, Neck cancer, Neuroblastoma, Neuroendocrine tumors, Non-Hodgkin lymphoma, Non-Hodgkin's lymphoma, Non-small cell lung cancer, Oat cell cancer, Ocular cancer, Ocular melanoma, Oligodendroglioma, Oral cancer, Oral cavity cancer, Oropharyngeal cancer, Osteogenic sarcoma, Osteosarcoma, Ovarian cancer, Ovarian epithelial cancer, Ovarian germ cell tumor, Ovarian primary peritoneal carcinoma, Ovarian sex cord stromal tumor, Paget's disease, Pancreatic cancer, Papillary carcinoma, Paranasal sinus cancer, Parathyroid cancer, Pelvic cancer, Penile cancer, Peripheral nerve cancer, Peritoneal cancer, Pharyngeal cancer, Pheochromocytoma, Pilocytic astrocytoma, Pineal region tumor, Pineoblastoma, Pituitary gland cancer, Primary central nervous system lymphoma, Prostate cancer, Rectal cancer, Renal cell cancer, Renal pelvis cancer, Rhabdomyosarcoma, Salivary gland cancer, Sarcoma, Sarcoma, bone, Sarcoma, soft tissue, Sarcoma, uterine, Sinus cancer, Skin cancer, Small cell lung cancer, Small intestine cancer, Soft tissue sarcoma, Spinal cancer, Spinal column cancer, Spinal cord cancer, Spinal tumor, Squamous cell carcinoma, Stomach cancer, Synovial sarcoma, T-cell lymphoma), Testicular cancer, Throat cancer, Thymoma/thymic carcinoma, Thyroid cancer, Tongue cancer, Tonsil cancer, Transitional cell cancer, Transitional cell cancer, Transitional cell cancer, Triple-negative breast cancer, Tubal cancer, Tubular carcinoma, Ureteral cancer, Ureteral cancer, Urethral cancer, Uterine adenocarcinoma, Uterine cancer, Uterine sarcoma, Vaginal cancer, and Vulvar cancer.

[0598] The present invention also provides methods of reducing tumor burden in a subject. In some embodiments. As used herein, “tumor burden” refers to the number of cancer cells, or the amount of cancer in a subject. In some aspects tumor burden also refers to tumor load. In some embodiments, the tumor may be disseminated throughout the body of the subject. In one aspect, the tumor may be a liquid tumor such as leukemia or a lymphoma. The methods of reducing tumor burden may involve administering to the subject, a therapeutically effective amount of the immune cells. Immune cells may be engineered to express the compositions described herein. In some embodiments, the immune cells expressing the compositions of the invention may be administered to the subject via any of the routes of delivery described herein. Also provided herein are dosing regimens for administering the immune cells. In some embodiments, the subject may also be administered a therapeutically effective amount of the stimulus to tune the expression of the immunotherapeutic agent. In some aspects, the immunotherapeutic agents may be capable of reducing the tumor burden. Regimens for ligand/stimulus dosing are also provided. Reduction in tumor burden may be measured by any of the methods known in the art including tumor imaging, and measurement of marker proteins. In some aspects, bioluminescent imaging may be used to measure tumor burden. Bioluminescence imaging utilizes native light emission from bioluminescent proteins such as luciferase. Such bioluminescent proteins can participate in chemical reactions that release photons by the addition of suitable substrates. The release of photons can be captured by sensitive detection methods and quantified. Tumor cells may be engineered to express luciferase and the efficacy of the compositions described herein to reduce tumor burden may quantified by imaging. In some aspects, the tumor burden may be measured by the flux of photons (photons per sec). In some embodiments, photon flux positively correlates with tumor burden.

### Infectious Diseases

[0599] In some embodiment, biocircuits of the invention may be used for the treatment of infectious diseases. Biocircuits of the invention may be introduced in cells suitable for adoptive cell transfer such as macrophages, dendritic cells, natural killer cells, and or T cells. Infectious diseases treated by the biocircuits of the invention may be diseases caused by viruses, bacteria, fungi, and/or parasites. IL15-IL15Ra payloads of the invention may be used to increase immune cell proliferation and/or persistence of the immune cells useful in treating infectious diseases.

[0600] “Infection diseases” herein refer to diseases caused by any pathogen or agent that infects mammalian cells, preferably human cells and causes a disease condition. Examples thereof include bacteria, yeast, fungi, protozoans, mycoplasma, viruses, prions, and parasites. Examples include those involved in (a) viral diseases such as, for example, diseases resulting from infection by an adenovirus, a herpesvirus (e.g., HSV-I, HSV-II, CMV, or VZV), a poxvirus (e-g-, an orthopoxvirus such as variola or vaccinia, or molluscum contagiosum), a picornavirus (e.g., rhinovirus or enterovirus), an orthomyxovirus (e.g., influenzavirus), a paramyxovirus (e.g., parainfluenza virus, mumps virus, measles virus, and respiratory syncytial virus (RSV)), a coronavirus (e.g., SARS), a papovavirus (e.g., papillomaviruses, such as those that cause genital warts, common warts, or plantar warts), a hepadnavirus (e.g., hepatitis B virus), a flavivirus (e.g., hepatitis C virus or Dengue virus), or a retrovirus (e.g., a lentivirus such as HIV); (b) bacterial diseases such as, for example, diseases resulting from infection by bacteria of, for example, the genus Escherichia, Enterobacter, Salmonella, Staphylococcus, Shigella, Listeria, Aerobacter, Helicobacter, Klebsiella, Proteus, Pseudomonas, Streptococcus, Chlamydia, Mycoplasma, Pneumococcus, Neisseria, Clostridium, Bacillus, Corynebacterium, Mycobacterium, Campylobacter, Vibrio, Serratia, Providencia, Chromobacterium, Brucella, Yersinia, Haemophilus, or Bordetella; (c) other infectious diseases, such chlamydia, fungal diseases including but not limited to candidiasis, aspergillosis, histoplasmosis, cryptococcal meningitis, parasitic diseases including but not limited to malaria, Pneumocystis carnii pneumonia, leishmaniasis, cryptosporidiosis, toxoplasmosis, and trypanosome infection and prions that cause human disease such as Creutzfeldt-Jakob Disease (CJD), variant Creutzfeldt-Jakob Disease (vCJD), Gerstmann-Straüssler-Scheinker syndrome, Fatal Familial Insomnia and kuru.

### 5. Microbiome

[0601] Alterations in the composition of the microbiome may impact the action of anti-cancer therapies. A diverse community of symbiotic, commensal and pathogenic microorganisms exist in all environmentally exposed sites in the body and is herein referred to as the “Microbiome.” Environmentally exposed sites of the body that may be inhabited by a microbiome include the skin, nasopharynx, the oral cavity, respiratory tract, gastrointestinal tract, and the reproductive tract.

[0602] In some embodiments, microbiome native or engineered with immunotherapeutic agents may be used to improve the efficacy of the anti-cancer immunotherapies. Methods of using microbiome to improve responsive to immunotherapeutic agents have been described by Sivan et al (Sivan A., et al. Commensal Bifidobacterium promotes antitumor immunity and facilitates anti-PD-L1 efficacy. Science 2015; 350:1084-9; the contents of which are incorporated herein by reference in their entirety). In one embodiment, protein, RNA and/or other biomolecules derived from the microbiome may be used as a payload to influence the efficacy of the anti-cancer immunotherapies.

### 6. Tools and Agents for Making Therapeutics

[0603] Provided in the present invention are tools and agents that may be used in generating immunotherapeutics for reducing a tumor volume or burden in a subject in need. A considerable number of variables are involved in producing a therapeutic agent, such as structure of the payload, type of cells, method of gene transfers, method and time of ex vivo expansion, pre-conditioning and the amount and type of tumor burden in the subject. Such parameters may be optimized using tools and agents described herein.

### Cell Lines

[0604] The present disclosure provides a mammalian cell that has been genetically modified with the compositions of the invention. Suitable mammalian cells include primary cells and immortalized cell lines. Suitable mammalian cell lines include, but are not limited to Human embryonic kidney cell line 293, fibroblast cell line NIH 3T3, human colorectal carcinoma cell line HCT116, ovarian carcinoma cell line SKOV-3, immortalized T cell lines (e.g. Jurkat cells and SupT1 cells), lymphoma cell line Raji cells, NALM-6 cells, K562 cells, HeLa cells, PC12 cells, HL-60 cells, NK cell lines (e.g. NKL, NK92, NK962, and YTS), and the like. In some instances, the cell is not an immortalized cell line, but instead a cell obtained from an individual and is herein referred to as a primary cell. For example, the cell is a T lymphocyte obtained from an individual. Other examples include, but are not limited to cytotoxic cells, stem cells, peripheral blood mononuclear cells or progenitor cells obtained from an individual.

### Tracking SREs, Biocircuits and Cell Lines

[0605] In some embodiments, it may be desirable to track the compositions of the invention or the cells modified by the compositions of the invention. Tracking may be achieved by using reporter moieties, which, as used herein, refers to any protein capable of creating a detectable signal, in response to an input. Examples include alkaline phosphatase, β-galactosidase, chloramphenicol acetyltransferase, β-glucuronidase, peroxidase, β-lactamase, catalytic antibodies, bioluminescent proteins e.g. luciferase, and fluorescent proteins such as Green fluorescent protein (GFP).

[0606] Reporter moieties may be used to monitor the response of the DD upon addition of the ligand corresponding to the DD. In other instances, reporter moieties may be used to track cell survival, persistence, cell growth, and/or localization in vitro, in vivo, or ex vivo.

[0607] In some embodiments, the preferred reporter moiety may be luciferase proteins. In one embodiment, the reporter moiety is the Renilla luciferase (SEQ ID NO. 684 encoded by nucleic acid sequence of SEQ ID NO. 685), or a firefly luciferase (SEQ ID NO. 686, encoded by nucleic acid sequence of SEQ ID NO. 687).

[0608] In some embodiments, the preferred reporter moiety may be luciferase proteins. In one embodiment, the reporter moiety is the Renilla luciferase, or a firefly luciferase.

### Animal Models

[0609] The utility and efficacy of the compositions of the present invention may be tested in vivo animal models, preferably mouse models. Mouse models used to may be syngeneic mouse models wherein mouse cells are modified with compositions of the invention and tested in mice of the same genetic background. Examples include pMEL-1 and 4T1 mouse models. Alternatively, xenograft models where human cells such as tumor cells and immune cells are introduced into immunodeficient mice may also be utilized in such studies. Immunodeficient mice used may be CByJ.Cg-Foxnlnu/J, B6; 12957-Rag1tm1Mom/J, B6.12957-Rag1tm1Mom/J, B6. CB17-Prkdcscid/SzJ, NOD.12957(B6)-Rag1tm1Mom/J, NOD.Cg-Rag1tm1MomPrf1tm1Sdz/Sz, NOD.CB17-Prkdcscid/SzJ, NOD.Cg-PrkdcscidB2mtmlUnc/J, NOD-scid IL2Rgnull, Nude (nu) mice, SCID mice, NOD mice, RAG1/RAG2 mice, NOD-Scid mice, IL2rgnull mice, b2mnull mice, NOD-scid IL2r□null mice, NOD-scid-B2mnull mice, beige mouse, and HLA transgenic mice.

### 7. Cellular Assays

[0610] In some embodiments, the effectiveness of the compositions of the inventions as immunotherapeutic agents may be evaluated using cellular assays. Levels of expression and/or identity of the compositions of the invention may be determined according to any methods known in the art for identifying proteins and/or quantitating proteins levels. In some embodiments, such methods may include Western Blotting, flow cytometry, and immunoassays.

[0611] Provided herein are methods for functionally characterizing cells expressing SRE, biocircuits and compositions of the invention. In some embodiments, functional characterization is carried out in primary immune cells or immortalized immune cell lines and may be determined by expression of cell surface markers. Examples of cell surface markers for T cells include, but are not limited to, CD3, CD4, CD8, CD 14, CD20, CD11b, CD16, CD45 and HLA-DR, CD 69, CD28, CD44, IFNgamma. Markers for T cell exhaustion include PD1, TIM3, BTLA, CD160, 2B4, CD39, and LAG3. Examples of cell surface markers for antigen presenting cells include, but are not limited to, MHC class I, MHC Class II, CD40, CD45, B7-1, B7-2, IFN γ receptor and IL2 receptor, ICAM-1 and/or Fcγ receptor. Examples of cell surface markers for dendritic cells include, but are not limited to, MHC class I, MHC Class II, B7-2, CD18, CD29, CD31, CD43, CD44, CD45, CD54, CD58, CD83, CD86, CMRF-44, CMRF-56, DCIR and/or Dectin-1 and the like; while in some cases also having the absence of CD2, CD3, CD4, CD8, CD14, CD15, CD16, CD 19, CD20, CD56, and/or CD57. Examples of cell surface markers for NK cells include, but are not limited to, CCL3, CCL4, CCL5, CCR4, CXCR4, CXCR3, NKG2D, CD71, CD69, CCR5, Phospho JAK/STAT, phospho ERK, phospho p38/MAPK, phospho AKT, phospho STAT3, Granulysin, Granzyme B, Granzyme K, IL10, IL22, IFNg, LAP, Perforin, and TNFa.

### 8. Diagnostics

[0612] In some embodiments, scFvs, CARs and compositions of the invention may be used as diagnostics. In some cases, scFvs, CARs and/compositions of the invention may be used to identify, label or stain cells, tissues, organs, etc. expressing target antigens. In further embodiments, scFvs, CARs and/compositions of the invention may be used to identify CD19 antigen present in tissue sections (i.e., histological tissue sections), including tissue known or suspected of having cancerous cells. Such methods of using scFvs of the invention may in some cases be used to identify cancerous cells or tumors in tissue sections. Tissue sections may be from any tissue or organ including, but not limited to breast, colon, pancreatic, ovarian, brain, liver, kidney, spleen, lung, skin, stomach, intestine, esophagus, and bone. scFvs, CARs and/compositions of the present invention may also be used to identify blood samples suspected to have or known to be cancerous blood sample and distinguish it from the normal tissue.

[0613] Diagnostics described herein can be used to determine whether a subject should be treated with a wild type CD19 CAR therapy or a CAR that recognizes mutant CD19. In a particular embodiment, the method comprises determining whether the cancer cell expresses a wild-type CD19 and/or a CD19 isoform, wherein the presence of a CD19 isoform and/or absence of wild type CD19 indicates that the cancer will be refractory to a wild type CD19 CAR therapy. Methods of determining whether a cancer cell expresses wild-type CD19 or a CD19 isoform or variant are described herein and include, without limitation, sequencing (e.g., all or part (e.g., ectodomain) of CD 19), isoform specific PCR, isoform-specific oligonucleotide or probe screening methods, recognition by isoform specific antibodies, etc.

### 9. Stem Cell Applications

[0614] The biocircuits of the present invention and/or any of their components may be utilized in the regulated reprogramming of cells, stem cell engraftment or other application where controlled or tunable expression of such reprogramming factors are useful.

[0615] The biocircuits of the present invention may be used in reprogramming cells including stem cells or induced stem cells. Induction of induced pluripotent stem cells (iPSC) was first achieved by Takahashi and Yamanaka (Cell, 2006. 126(4):663-76; herein incorporated by reference in its entirety) using viral vectors to express KLF4, c-MYC, OCT4 and SOX2 otherwise collectively known as KMOS.

[0616] Excisable lentiviral and transposon vectors, repeated application of transient plasmid, episomal and adenovirus vectors have also been used to try to derive iPSC (Chang, C. W., et al., Stem Cells, 2009. 27(5):1042-1049; Kaji, K., et al., Nature, 2009. 458(7239):771-5; Okita, K., et al., Science, 2008. 322(5903):949-53; Stadtfeld, M., et al., Science, 2008. 322(5903):945-9; Woltjen, K., et al., Nature, 2009; Yu, J., et al., Science, 2009:1172482; Fusaki, N., et al., Proc Jpn Acad Ser B Phys Biol Sci, 2009. 85(8):348-62; each of which is herein incorporated by reference in its entirety).

[0617] DNA-free methods to generate human iPSC has also been derived using serial protein transduction with recombinant proteins incorporating cell-penetrating peptide moieties (Kim, D., et al., Cell Stem Cell, 2009. 4(6): 472-476; Zhou, H., et al., Cell Stem Cell, 2009. 4(5):381-4; each of which is herein incorporated by reference in its entirety), and infectious transgene delivery using the Sendai virus (Fusaki, N., et al., Proc Jpn Acad Ser B Phys Biol Sci, 2009. 85(8): p. 348-62; herein incorporated by reference in its entirety).

[0618] The effector modules of the present invention may include a payload comprising any of the genes including, but not limited to, OCT such as OCT4, SOX such as SOX1, SOX2, SOX3, SOX15 and SOX18, NANOG, KLF such as KLF1, KLF2, KLF4 and KLF5, MYC such as c-MYC and n-MYC, REM2, TERT and LIN28 and variants thereof in support of reprogramming cells. Sequences of such reprogramming factors are taught in for example International Application PCT/US2013/074560, the contents of which are incorporated herein by reference in their entirety.

[0619] In some embodiments, the payload of the present invention may be cardiac lineage specification factors such as eomesodermin (EOMES), a T-box transcription factor; WNT signaling pathway components such as WNT3 and WNT 3A. EOMES is crucially required for the development of the heart. Cardiomyocyte programming by EOMES involves autocrine activation of the canonical WNT signaling pathway and vice versa. Under conditions that are conducive to promoting cardiac lineage, WNT signaling activates EOMES and EOMES in turn promotes WNT signaling creating a self-sustaining loop that promotes the cardiac lineage. An activation loop that is too weak or too strong promotes non-cardiac fates such as endodermal and other mesodermal fates respectively. The DDs of the present invention may be used to tune EOMES and WNT payload levels to generate an activation loop that initiate and/or sustain cardiac specification during gastrulation.

### V. Delivery Modalities and/or Vectors

### Vectors

[0620] The present invention also provides vectors that package polynucleotides of the invention encoding biocircuits, effector modules, SREs (DDs) and payloads, and combinations thereof. Vectors of the present invention may also be used to deliver the packaged polynucleotides to a cell, a local tissue site or a subject. These vectors may be of any kind, including DNA vectors, RNA vectors, plasmids, viral vectors and particles. Viral vector technology is well known and described in Sambrook et al. (2001, Molecular Cloning: A Laboratory Manual, Cold Spring Harbor Laboratory, New York). Viruses, which are useful as vectors include, but are not limited to lentiviral vectors, adenoviral vectors, adeno-associated viral (AAV) vectors, herpes simplex viral vectors, retroviral vectors, oncolytic viruses, and the like.

[0621] In general, vectors contain an origin of replication functional in at least one organism, a promoter sequence and convenient restriction endonuclease site, and one or more selectable markers e.g. a drug resistance gene.

[0622] As used herein a promoter is defined as a DNA sequence recognized by transcription machinery of the cell, required to initiate specific transcription of the polynucleotide sequence of the present invention. Vectors can comprise native or non-native promoters operably linked to the polynucleotides of the invention. The promoters selected may be strong, weak, constitutive, inducible, tissue specific, development stage-specific, and/or organism specific. One example of a suitable promoter is the immediate early cytomegalovirus (CMV) promoter sequence. This promoter sequence is a strong constitutive promoter sequence capable of driving high levels of expression of polynucleotide sequence that is operatively linked to it. Another example of a preferred promoter is Elongation Growth Factor-1. Alpha (EF-1. alpha). Other constitutive promoters may also be used, including, but not limited to simian virus 40 (SV40), mouse mammary tumor virus (MMTV), human immunodeficiency virus (HIV), long terminal repeat (LTR), promoter, an avian leukemia virus promoter, an Epstein-Barr virus immediate early promoter, a Rous sarcoma virus promoter as well as human gene promoters including, but not limited to the phosphoglycerate kinase (PGK) promoter, actin promoter, the myosin promoter, the hemoglobin promoter, the Ubiquitin C (Ubc) promoter, the human U6 small nuclear protein promoter and the creatine kinase promoter. In some instances, inducible promoters such as but not limited to metallothionine promoter, glucocorticoid promoter, a progesterone promoter, and a tetracycline promoter may be used. In some embodiments, the promoter may be selected from the SEQ ID NO. 556-558.

[0623] In some embodiments, the optimal promoter may be selected based on its ability to achieve minimal expression of the SREs and payloads of the invention in the absence of the ligand and detectable expression in the presence of the ligand.

[0624] Additional promoter elements e.g. enhancers may be used to regulate the frequency of transcriptional initiation. Such regions may be located 10-100 base pairs upstream or downstream of the start site. In some instances, two or more promoter elements may be used to cooperatively or independently activate transcription.

[0625] In some embodiments, the recombinant expression vector may comprise regulatory sequences, such as transcription and translation initiation and termination codons, which are specific to the type of host cell into which the vector is to be introduced.

[0626] Promoter selection for expression of SREs in T cells is described in Example 24 of International Patent Publication, WO2018/161017, Example 14 of International Patent Publication, WO2018/160993; and Example 16 of International Patent Publication, WO2018/161026; the contents of each of which are incorporated by reference in their entirety. The effect of PGK Promoter and N-terminal FKBP is described in Example 42 of International Patent Publication, WO2018/161017 and Example 36 of International Patent Publication, WO2018/161038; the contents of each of which are incorporated by reference in their entirety.

### 1. Lentiviral Vectors

[0627] In some embodiments, lentiviral vectors/particles may be used as vehicles and delivery modalities. Lentiviruses are subgroup of the Retroviridae family of viruses, named because reverse transcription of viral RNA genomes to DNA is required before integration into the host genome. As such, the most important features of lentiviral vehicles/particles are the integration of their genetic material into the genome of a target/host cell. Some examples of lentivirus include the Human Immunodeficiency Viruses: HIV-1 and HIV-2, the Simian Immunodeficiency Virus (SIV), feline immunodeficiency virus (FIV), bovine immunodeficiency virus (BIV), Jembrana Disease Virus (JDV), equine infectious anemia virus (EIAV), equine infectious anemia virus, visna-maedi and caprine arthritis encephalitis virus (CAEV).

[0628] Typically, lentiviral particles making up the gene delivery vehicle are replication defective on their own (also referred to as “self-inactivating”). Lentiviruses are able to infect both dividing and non-dividing cells by virtue of the entry mechanism through the intact host nuclear envelope (Naldini L et al., Curr. Opin. Biotechnol, 1998, 9: 457-463). Recombinant lentiviral vehicles/particles have been generated by multiply attenuating the HIV virulence genes, for example, the genes Env, Vif, Vpr, Vpu, Nef and Tat are deleted making the vector biologically safe. Correspondingly, lentiviral vehicles, for example, derived from HIV-1/HIV-2 can mediate the efficient delivery, integration and long-term expression of transgenes into non-dividing cells. As used herein, the term “recombinant” refers to a vector or other nucleic acid containing both lentiviral sequences and non-lentiviral retroviral sequences.

[0629] Lentiviral particles may be generated by co-expressing the virus packaging elements and the vector genome itself in a producer cell such as human HEK293T cells. These elements are usually provided in three (in second generation lentiviral systems) or four separate plasmids (in third generation lentiviral systems). The producer cells are co-transfected with plasmids that encode lentiviral components including the core (i.e. structural proteins) and enzymatic components of the virus, and the envelope protein(s) (referred to as the packaging systems), and a plasmid that encodes the genome including a foreign transgene, to be transferred to the target cell, the vehicle itself (also referred to as the transfer vector). In general, the plasmids or vectors are included in a producer cell line. The plasmids/vectors are introduced via transfection, transduction or infection into the producer cell line. Methods for transfection, transduction or infection are well known by those of skill in the art. As non-limiting example, the packaging and transfer constructs can be introduced into producer cell lines by calcium phosphate transfection, lipofection or electroporation, generally together with a dominant selectable marker, such as neo, DHFR, Gln synthetase or ADA, followed by selection in the presence of the appropriate drug and isolation of clones.

[0630] The producer cell produces recombinant viral particles that contain the foreign gene, for example, the effector module of the present invention. The recombinant viral particles are recovered from the culture media and titrated by standard methods used by those of skill in the art. The recombinant lentiviral vehicles can be used to infect target cells.

[0631] Cells that can be used to produce high-titer lentiviral particles may include, but are not limited to, HEK293T cells, 293G cells, STAR cells (Relander et al., Mol. Ther 2005, 11: 452-459), FreeStyle™ 293 Expression System (ThermoFisher, Waltham, Mass.), and other HEK293T-based producer cell lines (e.g., Stewart et al., Hum Gene Ther. 2011, 22 (3):357-369; Lee et al., Biotechnol Bioeng, 2012, 10996): 1551-1560; Throm et al., Blood. 2009, 113(21): 5104-5110; the contents of each of which are incorporated herein by reference in their entirety).

[0632] In some aspects, the envelope proteins may be heterologous envelop proteins from other viruses, such as the G protein of vesicular stomatitis virus (VSV G) or baculoviral gp64 envelop proteins. The VSV-G glycoprotein may especially be chosen among species classified in the vesiculovirus genus: Carajas virus (CJSV), Chandipura virus (CHPV), Cocal virus (COCV), Isfahan virus (ISFV), Maraba virus (MARAV), Piry virus (PIRYV), Vesicular stomatitis Alagoas virus (VSAV), Vesicular stomatitis Indiana virus (VSIV) and Vesicular stomatitis New Jersey virus (VSNJV) and/or stains provisionally classified in the vesiculovirus genus as Grass carp rhabdovirus, BeAn 157575 virus (BeAn 157575), Boteke virus (BTKV), Calchaqui virus (CQIV), Eel virus American (EVA), Gray Lodge virus (GLOV), Jurona virus (JURY), Klamath virus (KLAV), Kwatta virus (KWAV), La Joya virus (LJV), Malpais Spring virus (MSPV), Mount Elgon bat virus (MEBV), Perinet virus (PERV), Pike fry rhabdovirus (PFRV), Porton virus (PORV), Radi virus (RADIV), Spring viremia of carp virus (SVCV), Tupaia virus (TUPV), Ulcerative disease rhabdovirus (UDRV) and Yug Bogdanovac virus (YBV). The gp64 or other baculoviral env protein can be derived from Autographa californica nucleopolyhedrovirus (AcMNPV), Anagrapha falcifera nuclear polyhedrosis virus, Bombyx mori nuclear polyhedrosis virus, Choristoneura fumiferana nucleopolyhedrovirus, Orgyia pseudotsugata single capsid nuclear polyhedrosis virus, Epiphyas postvittana nucleopolyhedrovirus, Hyphantria cunea nucleopolyhedrovirus, Galleria mellonella nuclear polyhedrosis virus, Dhori virus, Thogoto virus, Antheraea pemyi nucleopolyhedrovirus or Batken virus.

[0633] Additional elements provided in lentiviral particles may comprise retroviral LTR (long-terminal repeat) at either 5′ or 3′ terminus, a retroviral export element, optionally a lentiviral reverse response element (RRE), a promoter or active portion thereof, and a locus control region (LCR) or active portion thereof. Other elements include central polypurine tract (cPPT) sequence to improve transduction efficiency in non-dividing cells, Woodchuck Hepatitis Virus (WHP) Posttranscriptional Regulatory Element (WPRE) which enhances the expression of the transgene and increases titer. The effector module is linked to the vector.

[0634] Methods for generating recombinant lentiviral particles are discussed in the art, for example, U.S. Pat. Nos. 8,846,385; 7,745,179; 7,629,153; 7,575,924; 7,179, 903; and 6,808,905; the contents of each of which are incorporated herein by reference in their entirety.

[0635] Lentivirus vectors used may be selected from, but are not limited to pLVX, pLenti, pLenti6, pLJM1, FUGW, pWPXL, pWPI, pLenti CMV puro DEST, pLJM1-EGFP, pULTRA, pInducer20, pHIV-EGFP, pCW57.1, pTRPE, pELPS, pRRL, and pLionll.

[0636] Lentiviral vehicles known in the art may also be used (See, U.S. Pat. Nos. 9,260,725; 9,068,199; 9,023,646; 8,900,858; 8,748,169; 8,709,799; 8,420,104; 8,329,462; 8,076,106; 6,013,516; and 5,994,136; International Patent Publication NO. WO2012079000; the contents of each of which are incorporated herein by reference in their entirety).

### 2. Retroviral Vectors (γ-Retroviral Vectors)

[0637] In some embodiments, retroviral vectors may be used to package and deliver the biocircuits, biocircuit components, effector modules, SREs or payloads of the present invention. Retroviral vectors (RVs) allow the permanent integration of a transgene in target cells. In addition to lentiviral vectors based on complex HIV-1/2, retroviral vectors based on simple gamma-retroviruses have been widely used to deliver therapeutic genes and demonstrated clinically as one of the most efficient and powerful gene delivery systems capable of transducing a broad range of cell types. Example species of Gamma retroviruses include the murine leukemia viruses (MLVs) and the feline leukemia viruses (FeLV).

[0638] In some embodiments, gamma-retroviral vectors derived from a mammalian gamma-retrovirus such as murine leukemia viruses (MLVs), are recombinant. The MLV families of gamma retroviruses include the ecotropic, amphotropic, xenotropic and polytropic subfamilies. Ecotropic viruses are able to infect only murine cells using mCAT-1 receptor. Examples of ecotropic viruses are Moloney MLV and AKV. Amphotropic viruses infect murine, human and other species through the Pit-2 receptor. One example of an amphotropic virus is the 4070A virus. Xenotropic and polytropic viruses utilize the same (Xpr1) receptor but differ in their species tropism. Xenotropic viruses such as NZB-9-1 infect human and other species but not murine species, whereas polytropic viruses such as focus-forming viruses (MCF) infect murine, human and other species.

[0639] Gamma-retroviral vectors may be produced in packaging cells by co-transfecting the cells with several plasmids including one encoding the retroviral structural and enzymatic (gag-pol) polyprotein, one encoding the envelope (env) protein, and one encoding the vector mRNA comprising polynucleotide encoding the compositions of the present invention that is to be packaged in newly formed viral particles.

[0640] In some aspects, the recombinant gamma-retroviral vectors are pseudotyped with envelope proteins from other viruses. Envelope glycoproteins are incorporated in the outer lipid layer of the viral particles which can increase/alter the cell tropism. Exemplary envelop proteins include the gibbon ape leukemia virus envelope protein (GALV) or vesicular stomatitis virus G protein (VSV-G), or Simian endogenous retrovirus envelop protein, or Measles Virus H and F proteins, or Human immunodeficiency virus gp120 envelope protein, or cocal vesiculovirus envelop protein (See, e.g., U.S. application publication NO. 2012/164118; the contents of which are incorporated herein by reference in its entirety). In other aspects, envelope glycoproteins may be genetically modified to incorporate targeting/binding ligands into gamma-retroviral vectors, binding ligands including, but not limited to, peptide ligands, single chain antibodies and growth factors (Waehler et al., Nat. Rev. Genet. 2007, 8(8):573-587; the contents of which are incorporated herein by reference in its entirety). These engineered glycoproteins can retarget vectors to cells expressing their corresponding target moieties. In other aspects, a “molecular bridge” may be introduced to direct vectors to specific cells. The molecular bridge has dual specificities: one end can recognize viral glycoproteins, and the other end can bind to the molecular determinant on the target cell. Such molecular bridges, for example ligand-receptor, avidin-biotin, and chemical conjugations, monoclonal antibodies and engineered fusogenic proteins, can direct the attachment of viral vectors to target cells for transduction (Yang et al., Biotechnol. Bioeng., 2008, 101(2): 357-368; and Maetzig et al., Viruses, 2011, 3, 677-713; the contents of each of which are incorporated herein by reference in their entirety).

[0641] In some embodiments, the recombinant gamma-retroviral vectors are self-inactivating (SIN) gammaretroviral vectors. The vectors are replication incompetent. SIN vectors may harbor a deletion within the 3′ U3 region initially comprising enhancer/promoter activity. Furthermore, the 5′ U3 region may be replaced with strong promoters (needed in the packaging cell line) derived from Cytomegalovirus or RSV, or an internal promoter of choice, and/or an enhancer element. The choice of the internal promoters may be made according to specific requirements of gene expression needed for a particular purpose of the invention.

[0642] In some embodiments, polynucleotides encoding the biocircuit, biocircuit components, effector module, SRE are inserted within the recombinant viral genome. The other components of the viral mRNA of a recombinant gamma-retroviral vector may be modified by insertion or removal of naturally occurring sequences (e.g., insertion of an IRES, insertion of a heterologous polynucleotide encoding a polypeptide or inhibitory nucleic acid of interest, shuffling of a more effective promoter from a different retrovirus or virus in place of the wild-type promoter and the like). In some examples, the recombinant gamma-retroviral vectors may comprise modified packaging signal, and/or primer binding site (PBS), and/or 5′-enhancer/promoter elements in the U3-region of the 5′-long terminal repeat (LTR), and/or 3′-SIN elements modified in the U3-region of the 3′-LTR. These modifications may increase the titers and the ability of infection.

[0643] Gamma retroviral vectors suitable for delivering biocircuit components, effector modules, SREs or payloads of the present invention may be selected from those disclosed in U.S. Pat. Nos. 8,828,718; 7,585,676; 7,351,585; U.S. application publication NO. 2007/048285; PCT application publication NOs. WO2010/113037; WO2014/121005; WO2015/056014; and EP Pat. NOs. EP1757702; EP1757703 (the contents of each of which are incorporated herein by reference in their entirety).

### 3. Adeno-Associated Viral Vectors (AAV)

[0644] In some embodiments, polynucleotides of present invention may be packaged into recombinant adeno-associated viral (rAAV) vectors. Such vectors or viral particles may be designed to utilize any of the known serotype capsids or combinations of serotype capsids. The serotype capsids may include capsids from any identified AAV serotypes and variants thereof, for example, AAV1, AAV2, AAV2G9, AAV3, AAV4, AAV4-4, AAV5, AAV6, AAV7, AAV8, AAV9, AAV10, AAV11, AAV12 and AAVrh10.

[0645] In one embodiment, the AAV serotype may have a sequence as described in Pulicherla et al. (Molecular Therapy, 2011, 19(6):1070-1078), U.S. Pat. Nos. 6,156,303; 7,198,951; U.S. Patent Publication NOs. US2015/0159173 and US2014/0359799; and International Patent Publication NOs. WO1998/011244, WO2005/033321 and WO2014/14422; the contents of each of which are incorporated herein by reference in their entirety.

[0646] AAV vectors include not only single stranded vectors but self-complementary AAV vectors (scAAVs). scAAV vectors contain DNA which anneals together to form double stranded vector genome. By skipping second strand synthesis, scAAVs allow for rapid expression in the cell.

[0647] The rAAV vectors may be manufactured by standard methods in the art such as by triple transfection, in sf9 insect cells or in suspension cell cultures of human cells such as HEK293 cells.

[0648] The biocircuits, biocircuit components, effector modules, SREs or payloads may be encoded in one or more viral genomes to be packaged in the AAV capsids taught herein.

[0649] Such vectors or viral genomes may also include, in addition to at least one or two ITRs (inverted terminal repeats), certain regulatory elements necessary for expression from the vector or viral genome. Such regulatory elements are well known in the art and include for example promoters, introns, spacers, stuffer sequences, and the like.

[0650] In some embodiments, more than one effector module or SRE (e.g. DD) may be encoded in a viral genome.

### 4. Oncolytic Viral Vector

[0651] In some embodiments, polynucleotides of present invention may be packaged into oncolytic viruses, such as vaccine viruses. Oncolytic vaccine viruses may include viral particles of a thymidine kinase (TK)-deficient, granulocyte macrophage (GM)-colony stimulating factor (CSF)-expressing, replication-competent vaccinia virus vector sufficient to induce oncolysis of cells in the tumor (e.g., U.S. Pat. No. 9,226,977).

5. Messenger RNA (mRNA)

[0652] In some embodiments, the effector modules of the invention may be designed as a messenger RNA (mRNA). As used herein, the term “messenger RNA” (mRNA) refers to any polynucleotide which encodes a polypeptide of interest and which is capable of being translated to produce the encoded polypeptide of interest in vitro, in vivo, in situ or ex vivo.

[0653] In some embodiments, the effector modules may be designed as self-amplifying RNA. “Self-amplifying RNA” as used herein refers to RNA molecules that can replicate in the host resulting in the increase in the amount of the RNA and the protein encoded by the RNA. Such self-amplifying RNA may have structural features or components of any of those taught in International Patent Application Publication No. WO2011005799 (the contents of which are incorporated herein by reference in their entirety).

### VI. Dosing, Delivery and Administrations

[0654] The compositions of the invention may be delivered to a cell or a subject through one or more routes and modalities. The viral vectors containing one or more effector modules, SREs, immunotherapeutic agents and other components described herein may be used to deliver them to a cell and/or a subject. Other modalities may also be used such as mRNAs, plasmids, and as recombinant proteins.

### 1. Delivery to Cells

[0655] In another aspect of the invention, polynucleotides encoding biocircuits, effector modules, SREs (e.g., DDs), payloads of interest (immunotherapeutic agents) and compositions of the invention and vectors comprising said polynucleotides may be introduced into cells such as immune effector cells.

[0656] In one aspect of the invention, polynucleotides encoding biocircuits, effector modules, SREs (e.g., DDs), payloads of interest (immunotherapeutic agents) and compositions of the invention, may be packaged into viral vectors or integrated into viral genomes allowing transient or stable expression of the polynucleotides. Preferable viral vectors are retroviral vectors including lentiviral vectors. In order to construct a retroviral vector, a polynucleotide molecule encoding a biocircuit, an effector module, a DD or a payload of interest (i.e. an immunotherapeutic agent) is inserted into the viral genome in the place of certain viral sequences to produce a virus that is replication-defective. The recombinant viral vector is then introduced into a packaging cell line containing the gag, pol, and env genes, but without the LTR and packaging components. The recombinant retroviral particles are secreted into the culture media, then collected, optionally concentrated, and used for gene transfer. Lentiviral vectors are especially preferred as they are capable of infecting both dividing and non-dividing cells.

[0657] Vectors may also be transferred to cells by non-viral methods by physical methods such as needles, electroporation, sonoporation, hyrdoporation; chemical carriers such as inorganic particles (e.g. calcium phosphate, silica, gold) and/or chemical methods. In some embodiments, synthetic or natural biodegradable agents may be used for delivery such as cationic lipids, lipid nano emulsions, nanoparticles, peptide-based vectors, or polymer-based vectors.

[0658] In some embodiments, the polypeptides of the invention may be delivered to the cell directly. In one embodiment, the polypeptides of the invention may be delivered using synthetic peptides comprising an endosomal leakage domain (ELD) fused to a cell penetration domain (CLD). The polypeptides of the invention are co introduced into the cell with the ELD-CLD-synthetic peptide. ELDs facilitate the escape of proteins that are trapped in the endosome, into the cytosol. Such domains are derived proteins of microbial and viral origin and have been described in the art. CPDs allow the transport of proteins across the plasma membrane and have also been described in the art. The ELD-CLD fusion proteins synergistically increase the transduction efficiency when compared to the co-transduction with either domain alone. In some embodiments, a histidine rich domain may optionally be added to the shuttle construct as an additional method of allowing the escape of the cargo from the endosome into the cytosol. The shuttle may also include a cysteine residue at the N or C terminus to generate multimers of the fusion peptide. Multimers of the ELD-CLD fusion peptides generated by the addition of cysteine residue to the terminus of the peptide show even greater transduction efficiency when compared to the single fusion peptide constructs. The polypeptides of the invention may also be appended to appropriate localization signals to direct the cargo to the appropriate sub-cellular location e.g. nucleus. In some embodiments any of the ELDs, CLDs or the fusion ELD-CLD synthetic peptides taught in the International Patent Publication, WO2016161516 and WO2017175072 may be useful in the present invention (the contents of each of which are herein incorporated by reference in their entirety).

### 2. Dosing

[0659] The present invention provides methods comprising administering any one or more compositions for immunotherapy to a subject in need thereof. These may be administered to a subject using any amount and any route of administration effective for preventing or treating a clinical condition such as cancer, infection diseases and other immunodeficient diseases.

[0660] Compositions in accordance with the invention are typically formulated in dosage unit form for ease of administration and uniformity of dosage. It will be understood, however, that the total daily usage of the compositions of the present invention may be decided by the attending physician within the scope of sound medical judgment. The specific therapeutically effective, or prophylactically effective dose level for any particular patient will depend upon a variety of factors including the disorder being treated and the severity of the disorder; the activity of the specific compound employed; the specific composition employed; the age, body weight, general health, sex and diet of the patient; the time of administration, route of administration, previous or concurrent therapeutic interventions and rate of excretion of the specific compound employed; the duration of the treatment; drugs used in combination or coincidental with the specific compound employed; and like factors well known in the medical arts.

[0661] Compositions of the invention may be used in varying doses to avoid T cell energy, prevent cytokine release syndrome and minimize toxicity associated with immunotherapy. For example, low doses of the compositions of the present invention may be used to initially treat patients with high tumor burden, while patients with low tumor burden may be treated with high and repeated doses of the compositions of the invention to ensure recognition of a minimal tumor antigen load. In another instance, the compositions of the present invention may be delivered in a pulsatile fashion to reduce tonic T cell signaling and enhance persistence in vivo. In some aspects, toxicity may be minimized by initially using low doses of the compositions of the invention, prior to administering high doses. Dosing may be modified if serum markers such as ferritin, serum C-reactive protein, IL6, IFN-γ, and TNF-α are elevated.

[0662] In some embodiments, the neurotoxicity may be associated with CAR or TIL therapy. Such neurotoxicity may be associated CD19-CARs. Toxicity may be due to excessive T cell infiltration into the brain. In some embodiments, neurotoxicity may be alleviated by preventing the passage of T cells through the blood brain barrier. This can be achieved by the targeted gene deletion of the endogenous alpha-4 integrin inhibitors such as tysabri/natalizumab may also be useful in the present invention.

[0663] Also provided herein are methods of administering ligands in accordance with the invention to a subject in need thereof. The ligand may be administered to a subject or to cells, using any amount and any route of administration effective for tuning the biocircuits of the invention. The exact amount required will vary from subject to subject, depending on the species, age, and general condition of the subject, the severity of the disease, the particular composition, its mode of administration, its mode of activity, and the like. The subject may be a human, a mammal, or an animal. Compositions in accordance with the invention are typically formulated in unit dosage form for ease of administration and uniformity of dosage. It will be understood, however, that the total daily usage of the compositions of the present invention may be decided by the attending physician within the scope of sound medical judgment. In certain embodiments, the ligands in accordance with the present invention may be administered at dosage levels sufficient to deliver from about 0.0001 mg/kg to about 100 mg/kg, from about 0.001 mg/kg to about 0.05 mg/kg, from about 0.005 mg/kg to about 0.05 mg/kg, from about 0.001 mg/kg to about 0.005 mg/kg, from about 0.05 mg/kg to about 0.5 mg/kg, from about 0.01 mg/kg to about 50 mg/kg, from about 0.1 mg/kg to about 40 mg/kg, from about 0.5 mg/kg to about 30 mg/kg, from about 0.01 mg/kg to about 10 mg/kg, from about 0.1 mg/kg to about 10 mg/kg, or from about 1 mg/kg to about 25 mg/kg, from about 10 mg/kg to about 100 mg/kg, from about 50 mg/kg to about 500 mg/kg, from about 100 mg/kg to about 1000 mg/kg, of subject body weight per day, one or more times a day, to obtain the desired effect. In some embodiments, the dosage levels may be 1 mg/kg, 5 mg/kg, 10 mg/kg, 20 mg/kg, 30 mg/kg, 40 mg/kg, 50 mg/kg, 60 mg/kg, 70 mg/kg, 80 mg/kg, 90 mg/kg, 100 mg/kg, 100 mg/kg, 110 mg/kg, 120 mg/kg, 130 mg/kg, 140 mg/kg, 150 mg/kg, 160 mg/kg, 170 mg/kg, 180 mg/kg, 190 mg/kg or mg/kg of subject body weight per day, or more times a day, to obtain the desired effect.

[0664] The present disclosure provides methods for delivering to a cell or tissue any of the ligands described herein, comprising contacting the cell or tissue with said ligand and can be accomplished in vitro, ex vivo, or in vivo. In certain embodiments, the ligands in accordance with the present invention may be administered to cells at dosage levels sufficient to deliver from about 1 nM to about 10 nM, from about 5 nM to about 50 nM, from about 10 nM to about 100 nM, from about 50 nM to about 500 nM, from about 100 nM to about 1000 nM, from about 1 μM to about 10 μM, from about 5 μM to about 50 μM from about 10 μM to about 100 μM from about 25 μM to about 250 μM from about 50 μM to about 500 μM. In some embodiments, the ligand may be administered to cells at doses selected from but not limited to 0.00064 μM, 0.0032 μM, 0.016 μM, 0.08 μM, 0.4 μM, 1 μM 2 μM, 10 μM, 50 μM, 75, μM, 100 μM, 150 μM, 175 μM, 200 μM, 250 μM.

[0665] The desired dosage of the ligands of the present invention may be delivered only once, three times a day, two times a day, once a day, every other day, every third day, every week, every two weeks, every three weeks, or every four weeks. In certain embodiments, the desired dosage may be delivered using multiple administrations (e.g., two, three, four, five, six, seven, eight, nine, ten, eleven, twelve, thirteen, fourteen, or more administrations). When multiple administrations are employed, split dosing regimens such as those described herein may be used. As used herein, a “split dose” is the division of “single unit dose” or total daily dose into two or more doses, e.g., two or more administrations of the “single unit dose”. As used herein, a “single unit dose” is a dose of any therapeutic administered in one dose/at one time/single route/single point of contact, i.e., single administration event. The desired dosage of the ligand of the present invention may be administered as a “pulse dose” or as a “continuous flow”. As used herein, a “pulse dose” is a series of single unit doses of any therapeutic administered with a set frequency over a period of time. As used herein, a “continuous flow” is a dose of therapeutic administered continuously for a period of time in a single route/single point of contact, i.e., continuous administration event. A total daily dose, an amount given or prescribed in 24-hour period, may be administered by any of these methods, or as a combination of these methods, or by any other methods suitable for a pharmaceutical administration.

### 3. Administration

[0666] In some embodiments, the compositions for immunotherapy may be administered to cells ex vivo and subsequently administered to the subject. Immune cells can be isolated and expanded ex vivo using a variety of methods known in the art. For example, methods of isolating cytotoxic T cells are described in U.S. Pat. Nos. 6,805,861 and 6,531,451; the contents of each of which are incorporated herein by reference in their entirety. Isolation of NK cells is described in U.S. Pat. No. 7,435,596; the contents of which are incorporated by reference herein in its entirety.

[0667] In some embodiments, compositions of the present invention, may be administered by any of the methods of administration taught in the copending commonly owned U.S. Provisional Patent Application No. 62/320,864 filed on Apr. 11, 2016, or in U.S. Provisional Application No. 62/466,596 filed Mar. 3, 2017 and the International Publication WO2017/180587, the contents of each of which are incorporated herein by reference in their entirety.

[0668] In some embodiments, depending upon the nature of the cells, the cells may be introduced into a host organism e.g. a mammal, in a wide variety of ways including by injection, transfusion, infusion, local instillation or implantation. In some aspects, the cells of the invention may be introduced at the site of the tumor. The number of cells that are employed will depend upon a number of circumstances, the purpose for the introduction, the lifetime of the cells, the protocol to be used, for example, the number of administrations, the ability of the cells to multiply, or the like. The cells may be in a physiologically-acceptable medium.

[0669] In some embodiments, the cells of the invention may be administrated in multiple doses to subjects having a disease or condition. The administrations generally effect an improvement in one or more symptoms of cancer or a clinical condition and/or treat or prevent cancer or clinical condition or symptom thereof.

[0670] In some embodiments, the compositions for immunotherapy may be administered in vivo. In some embodiments, polypeptides of the present invention comprising biocircuits, effector molecules, SREs, payloads of interest (immunotherapeutic agents) and compositions of the invention may be delivered in vivo to the subject. In vivo delivery of immunotherapeutic agents is well described in the art. For example, methods of delivery of cytokines are described in the E.P. Pat. NO. EP0930892 A1, the contents of which are incorporated herein by reference.

[0671] In one embodiment, the payloads of the present invention may be administered in conjunction with inhibitors of SHP-1 and/or SHP-2. The tyrosine-protein phosphatase SHP1 (also known as PTPN6) and SHP2 (also known as PTPN11) are involved in the Programmed Cell Death (PD1) inhibitory signaling pathway. The intracellular domain of PD1 contains an immunoreceptor tyrosine-based inhibitory motif (ITIM) and an immunoreceptor tyrosine-based switch motif (ITSM). ITSM has been shown to recruit SHP-1 and 2. This generates negative costimulatory micro clusters that induce the dephosphorylation of the proximal TCR signaling molecules, thereby resulting in suppression of T cell activation, which can lead to T cell exhaustion. In one embodiment, inhibitors of SHP-1 and 2 may include expressing dominant negative versions of the proteins in T cells, TILs or other cell types to relieve exhaustion. Such mutants can bind to the endogenous, catalytically active proteins, and inhibit their function. In one embodiment, the dominant negative mutant of SHP-1 and/or SHP-2 lack the phosphatase domain required for catalytic activity. In some embodiments, any of the dominant negative SHP-1 mutants taught Bergeron S et al. (2011). Endocrinology. 2011 December; 152(12):4581-8.; Dustin J B et al. (1999) J Immunol. March 1; 162(5):2717-24.; Berchtold S (1998) Mol Endocrinol. April; 12(4):556-67 and Schram et al. (2012) Am J Physiol Heart Circ Physiol. 1; 302(1): H231-43.; may be useful in the invention (the contents of each of which are incorporated by reference in their entirety).

### Routes of Delivery

[0672] The pharmaceutical compositions, biocircuits, biocircuit components, effector modules including their SREs (e.g., DDs), payloads (i.e. immunotherapeutic agents), vectors and cells of the present invention may be administered by any route to achieve a therapeutically effective outcome.

[0673] These include, but are not limited to enteral (into the intestine), gastroenteral, epidural (into the dura matter), oral (by way of the mouth), transdermal, peridural, intracerebral (into the cerebrum), intracerebroventricular (into the cerebral ventricles), epicutaneous (application onto the skin), intradermal, (into the skin itself), subcutaneous (under the skin), nasal administration (through the nose), intravenous (into a vein), intravenous bolus, intravenous drip, intra-arterial (into an artery), intramuscular (into a muscle), intracranial (into the heart), intraosseous infusion (into the bone marrow), intrathecal (into the spinal canal), intraperitoneal, (infusion or injection into the peritoneum), intrasinal infusion, intravitreal, (through the eye), intravenous injection (into a pathologic cavity) intracavitary (into the base of the penis), intravaginal administration, intrauterine, extra-amniotic administration, transdermal (diffusion through the intact skin for systemic distribution), transmucosal (diffusion through a mucous membrane), transvaginal, insufflation (snorting), sublingual, sublabial, enema, eye drops (onto the conjunctiva), in ear drops, auricular (in or by way of the ear), buccal (directed toward the cheek), conjunctival, cutaneous, dental (to a tooth or teeth), electro-osmosis, endocervical, endosinusial, endotracheal, extracorporeal, hemodialysis, infiltration, interstitial, intra-abdominal, intra-amniotic, intra-articular, intrabiliary, intrabronchial, intrabursal, intracartilaginous (within a cartilage), intracaudal (within the cauda equine), intracisternal (within the cisterna magna cerebellomedularis), intracorneal (within the cornea), dental intracornal, intracoronary (within the coronary arteries), intracorporus cavernosum (within the dilatable spaces of the corporus cavernosa of the penis), intradiscal (within a disc), intraductal (within a duct of a gland), intraduodenal (within the duodenum), intradural (within or beneath the dura), intraepidermal (to the epidermis), intraesophageal (to the esophagus), intragastric (within the stomach), intragingival (within the gingivae), intraileal (within the distal portion of the small intestine), intralesional (within or introduced directly to a localized lesion), intraluminal (within a lumen of a tube), intralymphatic (within the lymph), intramedullary (within the marrow cavity of a bone), intrameningeal (within the meninges), intramyocardial (within the myocardium), intraocular (within the eye), intraovarian (within the ovary), intrapericardial (within the pericardium), intrapleural (within the pleura), intraprostatic (within the prostate gland), intrapulmonary (within the lungs or its bronchi), intrasinal (within the nasal or periorbital sinuses), intraspinal (within the vertebral column), intrasynovial (within the synovial cavity of a joint), intratendinous (within a tendon), intratesticular (within the testicle), intrathecal (within the cerebrospinal fluid at any level of the cerebrospinal axis), intrathoracic (within the thorax), intratubular (within the tubules of an organ), intratumor (within a tumor), intratympanic (within the aurus media), intravascular (within a vessel or vessels), intraventricular (within a ventricle), iontophoresis (by means of electric current where ions of soluble salts migrate into the tissues of the body), irrigation (to bathe or flush open wounds or body cavities), laryngeal (directly upon the larynx), nasogastric (through the nose and into the stomach), occlusive dressing technique (topical route administration which is then covered by a dressing which occludes the area), ophthalmic (to the external eye), oropharyngeal (directly to the mouth and pharynx), parenteral, percutaneous, periarticular, peridural, perineural, periodontal, rectal, respiratory (within the respiratory tract by inhaling orally or nasally for local or systemic effect), retrobulbar (behind the pons or behind the eyeball), intramyocardial (entering the myocardium), soft tissue, subarachnoid, subconjunctival, submucosal, topical, transplacental (through or across the placenta), transtracheal (through the wall of the trachea), transtympanic (across or through the tympanic cavity), ureteral (to the ureter), urethral (to the urethra), vaginal, caudal block, diagnostic, nerve block, biliary perfusion, cardiac perfusion, photopheresis or spinal.

### VII. Definitions

[0674] At various places in the present specification, features or functions of the compositions of the present disclosure are disclosed in groups or in ranges. It is specifically intended that the present disclosure include each and every individual sub combination of the members of such groups and ranges. The following is a non-limiting list of term definitions.

[0675] Activity: As used herein, the term “activity” refers to the condition in which things are happening or being done. Compositions of the invention may have activity and this activity may involve one or more biological events. In some embodiments, biological events may include cell signaling events. In some embodiments, biological events may include cell signaling events associated protein interactions with one or more corresponding proteins, receptors, small molecules or any of the biocircuit components described herein.

[0676] Adoptive cell therapy (ACT): The terms “Adoptive cell therapy” or “Adoptive cell transfer”, as used herein, refer to a cell therapy involving in the transfer of cells into a patient, wherein cells may have originated from the patient, or from another individual, and are engineered (altered) before being transferred back into the patient. The therapeutic cells may be derived from the immune system, such as Immune effector cells: CD4+ T cell; CD8+ T cell, Natural Killer cell (NK cell); and B cells and tumor infiltrating lymphocytes (TILs) derived from the resected tumors. Most commonly transferred cells are autologous anti-tumor T cells after ex vivo expansion or manipulation. For example, autologous peripheral blood lymphocytes can be genetically engineered to recognize specific tumor antigens by expressing T-cell receptors (TCR) or chimeric antigen receptor (CAR).

[0677] Agent: As used herein, the term “agent” refers to a biological, pharmaceutical, or chemical compound. Non-limiting examples include simple or complex organic or inorganic molecule, a peptide, a protein, an oligonucleotide, an antibody, an antibody derivative, antibody fragment, a receptor, and soluble factor.

[0678] Agonist: the term “agonist” as used herein, refers to a compound that, in combination with a receptor, can produce a cellular response. An agonist may be a ligand that directly binds to the receptor. Alternatively, an agonist may combine with a receptor indirectly by, for example, (a) forming a complex with another molecule that directly binds to the receptor, or (b) otherwise resulting in the modification of another compound so that the other compound directly binds to the receptor. An agonist may be referred to as an agonist of a particular receptor or family of receptors, e.g., agonist of a co-stimulatory receptor.

[0679] Antagonist: the term “antagonist” as used herein refers to any agent that inhibits or reduces the biological activity of the target(s) it binds.

[0680] Antigen: the term “antigen” as used herein is defined as a molecule that provokes an immune response when it is introduced into a subject or produced by a subject such as tumor antigens which arise by the cancer development itself. This immune response may involve either antibody production, or the activation of specific immunologically-competent cells such as cytotoxic T lymphocytes and T helper cells, or both. An antigen can be derived from organisms, subunits of proteins/antigens, killed or inactivated whole cells or lysates. In the context of the invention, the terms “antigens of interest” or “desired antigens” refers to those proteins and/or other biomolecules provided herein that are immunospecifically bound or interact with antibodies of the present invention and/or fragments, mutants, variants, and/or alterations thereof described herein. In some embodiments, antigens of interest may comprise any of the polypeptides or payloads or proteins described herein, or fragments or portions thereof.

[0681] Approximately: As used herein, the term “approximately” or “about,” as applied to one or more values of interest, refers to a value that is similar to a stated reference value. In certain embodiments, the term “approximately” or “about” refers to a range of values that fall within 25, 20, 19, 18, 17, 16, 15, 14, 13, 12, 11, 10, 9, 8, 7, 6, 5, 4, 3, 2, 1, or less in either direction (greater than or less than) of the stated reference value unless otherwise stated or otherwise evident from the context (except where such number would exceed 100 of a possible value).

[0682] Associated with: As used herein, the terms “associated with,” “conjugated,” “linked,” “attached,” and “tethered,” when used with respect to two or more moieties, mean that the moieties are physically associated or connected with one another, either directly or via one or more additional moieties that serve as linking agents, to form a structure that is sufficiently stable so that the moieties remain physically associated under the conditions in which the structure is used, e.g., physiological conditions. An “association” need not be strictly through direct covalent chemical bonding. It may also suggest ionic or hydrogen bonding or a hybridization-based connectivity sufficiently stable such that the “associated” entities remain physically associated.

[0683] Autologous: the term “autologous” as used herein is meant to refer to any material derived from the same individual to which it is later to be re-introduced into the individual.

[0684] Barcode: the term “barcode” as used herein refers to polynucleotide or amino acid sequence that distinguishes one polynucleotide or amino acid from another.

[0685] Cancer: the term “cancer” as used herein refers a broad group of various diseases characterized by the uncontrolled growth of abnormal cells in the body. Unregulated cell division and growth results in the formation of malignant tumors that invade neighboring tissues ultimately metastasize to distant parts of the body through the lymphatic system or bloodstream.

[0686] Composition: As used herein, the term “composition” refers to a biological compound, a pharmaceutical compound, an immunotherapeutic agent, SRE, an effector molecule, or chemical compound. Non-limiting examples include simple or complex organic or inorganic molecule, a peptide, a protein, an oligonucleotide, a polynucleotide, an antibody, an antibody derivative, antibody fragment, a receptor, a soluble factor, biocircuit systems, effector modules, stimulus response elements (SREs) and immunotherapeutic agents, polynucleotides encoding the same, vectors and cells (e.g. T-cells) containing the polypeptides and/or polynucleotides.

[0687] Co-stimulatory molecule: As used herein, in accordance with its meaning in immune T cell activation, refers to a group of immune cell surface receptor/ligands which engage between T cells and APCs and generate a stimulatory signal in T cells which combines with the stimulatory signal in T cells that results from T cell receptor (TCR) recognition of antigen/MHC complex (pMHC) on APCs

[0688] Cytokines: the term “cytokines”, as used herein, refers to a family of small soluble factors with pleiotropic functions that are produced by many cell types that can influence and regulate the function of the immune system.

[0689] Delivery: the term “delivery” as used herein refers to the act or manner of delivering a compound, substance, entity, moiety, cargo or payload. A “delivery agent” refers to any agent which facilitates, at least in part, the in vivo delivery of one or more substances (including, but not limited to a compound and/or compositions of the present invention) to a cell, subject or other biological system cells.

[0690] Destabilized: As used herein, the term “destable,” “destabilize,” “destabilizing region” or “destabilizing domain” means a region or molecule that is less stable than a starting, reference, wild-type or native form of the same region or molecule.

[0691] Engineered: As used herein, embodiments of the invention are “engineered” when they are designed to have a feature or property, whether structural or chemical, that varies from a starting point, wild type or native molecule.

[0692] Expression: As used herein, “expression” of a nucleic acid sequence refers to one or more of the following events: (1) production of an RNA template from a DNA sequence (e.g., by transcription); (2) processing of an RNA transcript (e.g., by splicing, editing, 5′ cap formation, and/or 3′ end processing); (3) translation of an RNA into a polypeptide or protein; (4) folding of a polypeptide or protein; and (5) post-translational modification of a polypeptide or protein.

[0693] Feature: As used herein, a “feature” refers to a characteristic, a property, or a distinctive element.

[0694] Formulation: As used herein, a “formulation” includes at least a compound and/or composition of the present invention and a delivery agent.

[0695] Fragment: A “fragment,” as used herein, refers to a portion. For example, fragments of proteins may comprise polypeptides obtained by digesting full-length protein. In some embodiments, a fragment of a protein includes at least 3, 4, 5, 6, 7, 8, 9, 10, 11, 12, 13, 14, 15, 16, 17, 18, 19, 20, 25, 30, 35, 40, 45, 50, 55, 60, 65, 70, 75, 80, 85, 90, 95, 100, 150, 200, 250 or more amino acids. In some embodiments, fragments of an antibody include portions of an antibody.

[0696] Functional: As used herein, a “functional” biological molecule is a biological entity with a structure and in a form in which it exhibits a property and/or activity by which it is characterized.

[0697] Immune cells: the term “an immune cell”, as used herein, refers to any cell of the immune system that originates from a hematopoietic stem cell in the bone marrow, which gives rise to two major lineages, a myeloid progenitor cell (which give rise to myeloid cells such as monocytes, macrophages, dendritic cells, megakaryocytes and granulocytes) and a lymphoid progenitor cell (which give rise to lymphoid cells such as T cells, B cells and natural killer (NK) cells). Exemplary immune system cells include a CD4+ T cell, a CD8+ T cell, a CD4− CD8− double negative T cell, a Tγδ cell, a Tαβ cell, a regulatory T cell, a natural killer cell, and a dendritic cell. Macrophages and dendritic cells may be referred to as “antigen presenting cells” or “APCs,” which are specialized cells that can activate T cells when a major histocompatibility complex (MHC) receptor on the surface of the APC complexed with a peptide interacts with a TCR on the surface of a T cell.

[0698] Immunotherapy: the term “immunotherapy” as used herein, refers to a type of treatment of a disease by the induction or restoration of the reactivity of the immune system towards the disease.

[0699] Immunotherapeutic agent: the term “immunotherapeutic agent” as used herein, refers to the treatment of disease by the induction or restoration of the reactivity of the immune system towards the disease with a biological, pharmaceutical, or chemical compound.

[0700] In vitro: As used herein, the term “in vitro” refers to events that occur in an artificial environment, e.g., in a test tube or reaction vessel, in cell culture, in a Petri dish, etc., rather than within an organism (e.g., animal, plant, or microbe).

[0701] In vivo: As used herein, the term “in vivo” refers to events that occur within an organism (e.g., animal, plant, or microbe or cell or tissue thereof).

[0702] Linker: As used herein, a linker refers to a moiety that connects two or more domains, moieties or entities. In one embodiment, a linker may comprise 10 or more atoms. In a further embodiment, a linker may comprise a group of atoms, e.g., 10-1,000 atoms, and can be comprised of the atoms or groups such as, but not limited to, carbon, amino, alkylamino, oxygen, sulfur, sulfoxide, sulfonyl, carbonyl, and imine. In some embodiments, a linker may comprise one or more nucleic acids comprising one or more nucleotides. In some embodiments, the linker may comprise an amino acid, peptide, polypeptide or protein. In some embodiments, a moiety bound by a linker may include, but is not limited to an atom, a chemical group, a nucleoside, a nucleotide, a nucleobase, a sugar, a nucleic acid, an amino acid, a peptide, a polypeptide, a protein, a protein complex, a payload (e.g., a therapeutic agent). or a marker (including, but not limited to a chemical, fluorescent, radioactive or bioluminescent marker). The linker can be used for any useful purpose, such as to form multimers or conjugates, as well as to administer a payload, as described herein. Examples of chemical groups that can be incorporated into the linker include, but are not limited to, alkyl, alkenyl, alkynyl, amido, amino, ether, thioether, ester, alkylene, heteroalkylene, aryl, or heterocyclyl, each of which can be optionally substituted, as described herein. Examples of linkers include, but are not limited to, unsaturated alkanes, polyethylene glycols (e.g., ethylene or propylene glycol monomeric units, e.g., diethylene glycol, dipropylene glycol, triethylene glycol, tripropylene glycol, tetraethylene glycol, or tetraethylene glycol), and dextran polymers, Other examples include, but are not limited to, cleavable moieties within the linker, such as, for example, a disulfide bond (—S—S—) or an azo bond (—N═N—), which can be cleaved using a reducing agent or photolysis. Non-limiting examples of a selectively cleavable bonds include an amido bond which may be cleaved for example by the use of tris(2-carboxyethyl) phosphine (TCEP), or other reducing agents, and/or photolysis, as well as an ester bond which may be cleaved for example by acidic or basic hydrolysis.

[0703] Checkpoint/factor: As used herein, a checkpoint factor is any moiety or molecule whose function acts at the junction of a process. For example, a checkpoint protein, ligand or receptor may function to stall or accelerate the cell cycle.

[0704] Metabolite: Metabolites are the intermediate products of metabolic reactions catalyzed by enzymes that naturally occur within cells. This term is usually used to describe small molecules, fragments of larger biomolecules or processed products.

[0705] Modified: As used herein, the term “modified” refers to a changed state or structure of a molecule or entity as compared with a parent or reference molecule or entity. Molecules may be modified in many ways including chemically, structurally, and functionally. In some embodiments, compounds and/or compositions of the present invention are modified by the introduction of non-natural amino acids.

[0706] Mutation: As used herein, the term “mutation” refers to a change and/or alteration. In some embodiments, mutations may be changes and/or alterations to proteins (including peptides and polypeptides) and/or nucleic acids (including polynucleic acids). In some embodiments, mutations comprise changes and/or alterations to a protein and/or nucleic acid sequence. Such changes and/or alterations may comprise the addition, substitution and or deletion of one or more amino acids (in the case of proteins and/or peptides) and/or nucleotides (in the case of nucleic acids and or polynucleic acids e.g., polynucleotides). In some embodiments, wherein mutations comprise the addition and/or substitution of amino acids and/or nucleotides, such additions and/or substitutions may comprise 1 or more amino acid and/or nucleotide residues and may include modified amino acids and/or nucleotides. The resulting construct, molecule or sequence of a mutation, change or alteration may be referred to herein as a mutant.

[0707] Neoantigen: the term “neoantigen”, as used herein, refers to a tumor antigen that is present in tumor cells but not normal cells and do not induce deletion of their cognate antigen specific T cells in thymus (i.e., central tolerance). These tumor neoantigens may provide a “foreign” signal, similar to pathogens, to induce an effective immune response needed for cancer immunotherapy. A neoantigen may be restricted to a specific tumor. A neoantigen be a peptide/protein with a missense mutation (missense neoantigen), or a new peptide with long, completely novel stretches of amino acids from novel open reading frames (neoORFs). The neoORFs can be generated in some tumors by out-of-frame insertions or deletions (due to defects in DNA mismatch repair causing microsatellite instability), gene-fusion, read-through mutations in stop codons, or translation of improperly spliced RNA (e.g., Saeterdal et al., Proc Natl Acad Sci USA, 2001, 98: 13255-13260).

[0708] Off-target: As used herein, “off target” refers to any unintended effect on any one or more target, gene, cellular transcript, cell, and/or tissue.

[0709] Operably linked: As used herein, the phrase “operably linked” refers to a functional connection between two or more molecules, constructs, transcripts, entities, moieties or the like.

[0710] Payload or payload of interest (POI): the terms “payload” and “payload of interest (POI)”, as used herein, are used interchangeable. A payload of interest (POI) refers to any protein or compound whose function is to be altered. In the context of the present invention, the POI is a component in the immune system, including both innate and adaptive immune systems. Payloads of interest may be a protein, a fusion construct encoding a fusion protein, or non-coding gene, or variant and fragment thereof. Payload of interest may, when amino acid based, may be referred to as a protein of interest.

[0711] Pharmaceutically acceptable excipients: the term “pharmaceutically acceptable excipient,” as used herein, refers to any ingredient other than active agents (e.g., as described herein) present in pharmaceutical compositions and having the properties of being substantially nontoxic and non-inflammatory in subjects. In some embodiments, pharmaceutically acceptable excipients are vehicles capable of suspending and/or dissolving active agents. Excipients may include, for example: antiadherents, antioxidants, binders, coatings, compression aids, disintegrants, dyes (colors), emollients, emulsifiers, fillers (diluents), film formers or coatings, flavors, fragrances, glidants (flow enhancers), lubricants, preservatives, printing inks, sorbents, suspending or dispersing agents, sweeteners, and waters of hydration. Exemplary excipients include, but are not limited to: butylated hydroxytoluene (BHT), calcium carbonate, calcium phosphate (dibasic), calcium stearate, croscarmellose, crosslinked polyvinyl pyrrolidone, citric acid, crospovidone, cysteine, ethylcellulose, gelatin, hydroxypropyl cellulose, hydroxypropyl methylcellulose, lactose, magnesium stearate, maltitol, mannitol, methionine, methylcellulose, methyl paraben, microcrystalline cellulose, polyethylene glycol, polyvinyl pyrrolidone, povidone, pregelatinized starch, propyl paraben, retinyl palmitate, shellac, silicon dioxide, sodium carboxymethyl cellulose, sodium citrate, sodium starch glycolate, sorbitol, starch (corn), stearic acid, sucrose, talc, titanium dioxide, vitamin A, vitamin E, vitamin C, and xylitol.

[0712] Pharmaceutically acceptable salts: Pharmaceutically acceptable salts of the compounds described herein are forms of the disclosed compounds wherein the acid or base moiety is in its salt form (e.g., as generated by reacting a free base group with a suitable organic acid). Examples of pharmaceutically acceptable salts include, but are not limited to, mineral or organic acid salts of basic residues such as amines; alkali or organic salts of acidic residues such as carboxylic acids; and the like. Representative acid addition salts include acetate, adipate, alginate, ascorbate, aspartate, benzenesulfonate, benzoate, bisulfate, borate, butyrate, camphorate, camphorsulfonate, citrate, cyclopentanepropionate, digluconate, dodecylsulfate, ethanesulfonate, fumarate, glucoheptonate, glycerophosphate, hemisulfate, heptonate, hexanoate, hydrobromide, hydrochloride, hydroiodide, 2-hydroxy-ethanesulfonate, lactobionate, lactate, laurate, lauryl sulfate, malate, maleate, malonate, methanesulfonate, 2-naphthalenesulfonate, nicotinate, nitrate, oleate, oxalate, palmitate, pamoate, pectinate, persulfate, 3-phenylpropionate, phosphate, picrate, pivalate, propionate, stearate, succinate, sulfate, tartrate, thiocyanate, toluenesulfonate, undecanoate, valerate salts, and the like. Representative alkali or alkaline earth metal salts include sodium, lithium, potassium, calcium, magnesium, and the like, as well as nontoxic ammonium, quaternary ammonium, and amine cations, including, but not limited to ammonium, tetramethylammonium, tetraethylammonium, methylamine, dimethylamine, trimethylamine, triethylamine, ethylamine, and the like. Pharmaceutically acceptable salts include the conventional non-toxic salts, for example, from non-toxic inorganic or organic acids. In some embodiments, a pharmaceutically acceptable salt is prepared from a parent compound which contains a basic or acidic moiety by conventional chemical methods. Generally, such salts can be prepared by reacting the free acid or base forms of these compounds with a stoichiometric amount of the appropriate base or acid in water or in an organic solvent, or in a mixture of the two; generally, nonaqueous media like ether, ethyl acetate, ethanol, isopropanol, or acetonitrile are preferred. Lists of suitable salts are found in Remington's Pharmaceutical Sciences, 17th ed., Mack Publishing Company, Easton, Pa., 1985, p. 1418, Pharmaceutical Salts: Properties, Selection, and Use, P. H. Stahl and C. G. Wermuth (eds.), Wiley-VCH, 2008, and Berge et al., Journal of Pharmaceutical Science, 66, 1-19 (1977), each of which is incorporated herein by reference in its entirety. Pharmaceutically acceptable solvate: The term “pharmaceutically acceptable solvate,” as used herein, refers to a crystalline form of a compound wherein molecules of a suitable solvent are incorporated in the crystal lattice. For example, solvates may be prepared by crystallization, recrystallization, or precipitation from a solution that includes organic solvents, water, or a mixture thereof. Examples of suitable solvents are ethanol, water (for example, mono-, di-, and tri-hydrates), N-methylpyrrolidinone (NMP), dimethyl sulfoxide (DMSO), N, N′-dimethylformamide (DMF), N, N′-dimethylacetamide (DMAC), 1,3-dimethyl-2-imidazolidinone (DMEU), 1,3-dimethyl-3,4,5,6-tetrahydro-2-(1H)-pyrimidinone (DMPU), acetonitrile (ACN), propylene glycol, ethyl acetate, benzyl alcohol, 2-pyrrolidone, benzyl benzoate, and the like. When water is the solvent, the solvate is referred to as a “hydrate.” In some embodiments, the solvent incorporated into a solvate is of a type or at a level that is physiologically tolerable to an organism to which the solvate is administered (e.g., in a unit dosage form of a pharmaceutical composition).

[0713] Stable: As used herein “stable” refers to a compound or entity that is sufficiently robust to survive isolation to a useful degree of purity from a reaction mixture, and preferably capable of formulation into an efficacious therapeutic agent.

[0714] Stabilized: As used herein, the term “stabilize”, “stabilized,” “stabilized region” means to make or become stable. In some embodiments, stability is measured relative to an absolute value. In some embodiments, stability is measured relative to a secondary status or state or to a reference compound or entity.

[0715] Standard CAR: As used herein, the term “standard CAR” refers to the standard design of a chimeric antigen receptor. The components of a CAR fusion protein including the extracellular scFv fragment, transmembrane domain and one or more intracellular domains are linearly constructed as a single fusion protein.

[0716] Stimulus response element (SRE): the term “stimulus response element (SRE), as used herein, is a component of an effector module which is joined, attached, linked to or associated with one or more payloads of the effector module and in some instances, is responsible for the responsive nature of the effector module to one or more stimuli. As used herein, the “responsive” nature of an SRE to a stimulus may be characterized by a covalent or non-covalent interaction, a direct or indirect association or a structural or chemical reaction to the stimulus. Further, the response of any SRE to a stimulus may be a matter of degree or kind. The response may be a partial response. The response may be a reversible response. The response may ultimately lead to a regulated signal or output. Such output signal may be of a relative nature to the stimulus, e.g., producing a modulatory effect of between 1 and 100 or a factored increase or decrease such as 2-fold, 3-fold, 4-fold, 5-fold, 10-fold or more. One non-limiting example of an SRE is a destabilizing domain (DD).

[0717] Subject: As used herein, the term “subject” or “patient” refers to any organism to which a composition in accordance with the invention may be administered, e.g., for experimental, diagnostic, prophylactic, and/or therapeutic purposes. Typical subjects include animals (e.g., mammals such as mice, rats, rabbits, non-human primates, and humans) and/or plants.

[0718] Tandem: As used herein, the term “tandem” refers to a pattern of arrangement wherein two or more entities are arranged adjacent one another or act in conjunction. In some embodiments, the entity may be a nucleic acid or an amino acid. In one embodiment, the entity may be a payload. In one aspect, the payload may be an immunotherapeutic agent.

[0719] T cell: A T cell is an immune cell that produces T cell receptors (TCRs). T cells can be naïve (not exposed to antigen; increased expression of CD62L, CCR7, CD28, CD3, CD127, and CD45RA, and decreased expression of CD45RO as compared to T_{EM}), memory T cells (T_{M}) (antigen-experienced and long-lived), and effector cells (antigen-experienced, cytotoxic). T_{M} can be further divided into subsets of central memory T cells (T_{CM}, increased expression of CD62L, CCR7, CD28, CD127, CD45RO, and CD95, and decreased expression of CD54RA as compared to naïve T cell and effector memory T cells (T_{EM}, decreased expression of CD62L, CCR7, CD28, CD45RA, and increased expression of CD127 as compared to naïve T cells or T_{CM}). Effector T cells (T_{E}) refers to antigen-experienced CD8+ cytotoxic T lymphocytes that have decreased expression of CD62L, CCR7, CD28, and are positive for granzyme and perforin as compared to T_{CM}. Other exemplary T cells include regulatory T cells, such as CD4+CD25+(Foxp3+) regulatory T cells and Treg17 cells, as well as Tr1, Th3, CD8+CD28−, and Qa-1 restricted T cells.

[0720] T cell receptor: T cell receptor (TCR) refers to an immunoglobulin superfamily member having a variable antigen binding domain, a constant domain, a transmembrane region, and a short cytoplasmic tail, which is capable of specifically binding to an antigen peptide bound to a MHC receptor. A TCR can be found on the surface of a cell or in soluble form and generally is comprised of a heterodimer having α and β chains (also known as TCRα and TCRβ, respectively), or γ and δ chains (also known as TCRγ and TCRδ, respectively). The extracellular portion of TCR chains (e.g., α-chain, (3-chain) contains two immunoglobulin domains, a variable domain (e.g., α-chain variable domain or V_{α}, β-chain variable domain or V_{β}) at the N terminus, and one constant domain (e.g., α-chain constant domain or C_{α} and β-chain constant domain or C_{β}) adjacent to the cell membrane. Similar to immunoglobulin, the variable domains contain complementary determining regions (CDRs) separated by framework regions (FRs). A TCR is usually associated with the CD3ξ complex to form a TCR complex. As used herein, the term “TCR complex” refers to a complex formed by the association of CD3 with TCR. For example, a TCR complex can be composed of a CD3γ chain, a CD3δ chain, two CD3ε chains, a homodimer of CD3ξ chains, a TCRα chain, and a TCRβ chain. Alternatively, a TCR complex can be composed of a CD3γ chain, a CD3δ chain, two CD3ε chains, a homodimer of CD3ξ chains, a TCRγ chain, and a TCRδ chain. A “component of a TCR complex,” as used herein, refers to a TCR chain (i.e., TCRα, TCRβ, TCRγ or TCRδ), a CD3 chain (i.e., CD3γ, CD3δ, CD3ε or CD3ξ, or a complex formed by two or more TCR chains or CD3ξ chains (e.g., a complex of TCRα and TCRβ, a complex of TCRγ and TCRδ, a complex of CD3ε and CD3δ, a complex of CD3γ and CD3ε, or a sub-TCR complex of TCRα, TCRβ, CD3γ, CD3δ, and two CD3ε chains.

[0721] Therapeutically effective amount: As used herein, the term “therapeutically effective amount” means an amount of an agent to be delivered (e.g., nucleic acid, drug, therapeutic agent, diagnostic agent, prophylactic agent, etc.) that is sufficient, when administered to a subject suffering from or susceptible to an infection, disease, disorder, and/or condition, to treat, improve symptoms of, diagnose, prevent, and/or delay the onset of the infection, disease, disorder, and/or condition. In some embodiments, a therapeutically effective amount is provided in a single dose. In some embodiments, a therapeutically effective amount is administered in a dosage regimen comprising a plurality of doses. Those skilled in the art will appreciate that in some embodiments, a unit dosage form may be considered to comprise a therapeutically effective amount of a particular agent or entity if it comprises an amount that is effective when administered as part of such a dosage regimen.

[0722] Treatment or treating: As used herein, the terms “treatment” or “treating” denote an approach for obtaining a beneficial or desired result including and preferably a beneficial or desired clinical result. Such beneficial or desired clinical results include, but are not limited to, one or more of the following: reducing the proliferation of (or destroying) cancerous cells or other diseased, reducing metastasis of cancerous cells found in cancers, shrinking the size of the tumor, decreasing symptoms resulting from the disease, increasing the quality of life of those suffering from the disease, decreasing the dose of other medications required to treat the disease, delaying the progression of the disease, and/or prolonging survival of individuals.

[0723] Tune: As used herein, the term “tune” means to adjust, balance or adapt one thing in response to a stimulus or toward a particular outcome. In one non-limiting example, the SREs and/or DDs of the present invention adjust, balance or adapt the function or structure of compositions to which they are appended, attached or associated with in response to particular stimuli and/or environments.

### Equivalents and Scope

[0724] Those skilled in the art will recognize or be able to ascertain using no more than routine experimentation, many equivalents to the specific embodiments in accordance with the invention described herein. The scope of the present invention is not intended to be limited to the above Description, but rather is as set forth in the appended claims.

[0725] In the claims, articles such as “a,” “an,” and “the” may mean one or more than one unless indicated to the contrary or otherwise evident from the context. Claims or descriptions that include “or” between one or more members of a group are considered satisfied if one, more than one, or all of the group members are present in, employed in, or otherwise relevant to a given product or process unless indicated to the contrary or otherwise evident from the context. The invention includes embodiments in which exactly one member of the group is present in, employed in, or otherwise relevant to a given product or process. The invention includes embodiments in which more than one, or the entire group members are present in, employed in or otherwise relevant to a given product or process.

[0726] It is also noted that the term “comprising” is intended to be open and permits but does not require the inclusion of additional elements or steps. When the term “comprising” is used herein, the term “consisting of” is thus also encompassed and disclosed.

[0727] Where ranges are given, endpoints are included. Furthermore, it is to be understood that unless otherwise indicated or otherwise evident from the context and understanding of one of ordinary skill in the art, values that are expressed as ranges can assume any specific value or subrange within the stated ranges in different embodiments of the invention, to the tenth of the unit of the lower limit of the range, unless the context clearly dictates otherwise.

[0728] In addition, it is to be understood that any particular embodiment of the present invention that falls within the prior art may be explicitly excluded from any one or more of the claims. Since such embodiments are deemed to be known to one of ordinary skill in the art, they may be excluded even if the exclusion is not set forth explicitly herein. Any particular embodiment of the compositions of the invention (e.g., any antibiotic, therapeutic or active ingredient; any method of production; any method of use; etc.) can be excluded from any one or more claims, for any reason, whether or not related to the existence of prior art.

[0729] It is to be understood that the words which have been used are words of description rather than limitation, and that changes may be made within the purview of the appended claims without departing from the true scope and spirit of the invention in its broader aspects.

[0730] While the present invention has been described at some length and with some particularity with respect to the several described embodiments, it is not intended that it should be limited to any such particulars or embodiments or any particular embodiment, but it is to be construed with references to the appended claims so as to provide the broadest possible interpretation of such claims in view of the prior art and, therefore, to effectively encompass the intended scope of the invention. The present invention is further illustrated by the following nonlimiting examples.

### EXAMPLES

### Example 1. TMP Regulation of pELNS Based DD IL12 Constructs

[0731] HEK293T cells were transiently transfected for 48 hours with DNA from constructs OT-001444 (pELNS, p40ss-FlexiIL12-hDHFR(I17V)), OT-001445 (pELNS, p40ss-FlexiIL12-Furin hDHFR (I17V)), OT-001446 (pELNS, p40ss-FlexiIL12-hDHFR (Y1220) or OT-001447 (pELNS, p40ss-FlexiIL12-Furin-hDHFR(Y122I)). Vehicle control or 50 μM TMP (+T) was added during the last 24 hours of culture. IL12p40 secreted in the cell supernatants was analyzed in an MSD assay. TMP regulated IL12-hDHFR in HEK293T cells. 100 μM overnight incubation with TMP also increased secretion of all IL12-hDHFR constructs in T cells. IL12 expression was 5.2-fold greater for the OT-001444 construct with TMP, 2-fold for OT-001445, 3.6-fold for OT-001446 and 1.6-fold for OT-001447.

### Example 2. Trimethoprim Dependent IL15-IL15Ra Regulation

[0732] HCT-116 cells stably expressing the OT-001111 (OT-IL15-009) cassette were incubated with 0 to 250 μM TMP ligand (or DMSO) for 24 hours. Membrane bound IL15-IL15Ra levels were assessed using flow cytometry detection of IL15Ra. The mean fluorescent intensities (MFI) obtained with each dose, are shown in Table 10.

TABLE 10
TMP dose response

| Dose | | |
|---|---|---|
| (μM) | TMP | DMSO |
| 250 | 1576 | 250 |
| 50 | 1344 | 255 |
| 10 | 1204 | 262 |
| 2 | 1104 | 241 |
| 0.4 | 1001 | 233 |
| 0.08 | 769 | 222 |
| 0.016 | 666 | 219 |
| 0.0032 | 469 | 227 |
| 0.00064 | 304 | 227 |
| 0 | 262 | 238 |

[0733] Higher concentrations of TMP resulted in higher expression of IL15Ra. As little as 0.0032 μM of TMP resulted in MFI levels above DMSO controls.

[0734] Regulation of IL15-IL15Ra by TMP was also tested in T cells. Constitutive and ecDHFR regulated mbIL15 constructs were inserted into lentiviral transfer vector downstream of EF1a promoter. CD3/CD28 activated primary human T-cells were transduced with OT-001422 OT-IL15-071) or with OT-001471 OT-IL15-073) lentivirus. Cells were incubated with vehicle (DMSO) or 50 μM Trimethoprim for 24 hrs. Following the incubation, IL15 receptor alpha levels were quantified using FACS. TMP dependent IL15Ra expression was observed with the DD regulated construct (OT-001471; OT-IL15-073), which presented two peaks in the FACS plot, while the DMSO control presented only one peak to the left. As expected, IL15Ra levels were also detected with the OT-001422 OT-IL15-071) which expresses IL15-IL15Ra constitutively, which presented two peaks in the FACS plot, when compared to untransduced cells, which only presented one peak. Thus, trimethoprim dose dependently regulates IL15-IL15Ra in primary human T cells.

### Example 3. Effect of Promoter on FKBP Regulated DD-IL12 Constructs

[0735] Human T cells were activated with CD3/CD28 Dynabeads (Life Technologies) for 1 day prior to transduction with lentivirus carrying the transgene related to constructs OT-IL12-020 and OT-IL12-026. Seven days after the transduction, cells were treated with 1 μM Shield-1 for 24 hrs. Flexi IL12 was quantified by MSD assay for IL12p70. As shown in FIG. 3, construct OT-IL12-026 (annotated as 026 in FIG. 3) showed IL12 production only upon treatment with Shield-1 at levels of about 4,000 pg/ml. As expected, the positive control construct, OT-IL12-020 (annotated as 020 in FIG. 3) showed constitute IL12 expression in the absence of ligand and the empty vector control did not show any IL12 expression. These data show that shield-1 regulates Flexi IL12 production driven by the EF1a promoter in T-cells.

[0736] The effect of the PGK promoter on IL12 regulation was compared to the EF1a promoter in FKBP regulated constructs. T cells were transduced with lentivirus carrying transgene related to constructs OT-IL12-025 and OT-IL12-026. T cells were cultured similar to the experiments related to FIG. 3. The IL12 regulation achieved with the PGK construct, OT-IL12-025 was lower in the presence of Shield 1 when compared to the levels obtained with the EF1a promoter driven construct OT-IL12-026 as shown in FIG. 4, where the constructs are denoted as 025 and 026 respectively. In the absence of ligand, lower levels of IL12 (˜10 pg/ml) with the PGK promoter construct. Taken together, these data show that Shield-1 regulates Flexi IL12 production from EF1a or PGK promoter in T-cells, and the PGK promoter drives lower levels of IL12 than the EF1a promoter.

### Example 4. IL12 Regulation in Constructs Co-Expressing CAR

[0737] CD19 CAR and IL12 payloads were formatted into tandem expression cassettes where the two payloads were separated by an internal ribosome entry site (IRES)/or P2A (porcine teschovirus-1 2A) site. An FKBP DD was added to the C-terminal of some of the constructs to test the ability of biocircuits of the present disclosure to tune IL12 expression in the constructs.

[0738] Primary human T cells were transduced with virus related to OT-001356 OT-CD19-IL12-009), OT-001357 OT-CD19-IL12-010), OT-001386 OT-CD19-IL12-011) and OT-001387 OT-CD19-IL12-013). As a control, construct OT-001442 OT-IL12-096) that only expresses IL12 constitutively and OT-001407 (OT-CD19-063), which only expresses CD19 CAR constitutively were also included in the experiment. Seven days after transduction, cells were washed and plated in fresh media. After 24 hours of incubation, Flexi IL12 levels in the supernatant were quantified using MSD for IL12 p70 and the results were calculated as IL12 pg/ml per 1 million cells at 17 hours. As shown in FIG. 1 the placement of an IRES between the CD19 CAR and the IL12 in OT-001356 (OT-CD19-IL12-009), reduced the expression of IL12 from the tandem expression construct. The levels of IL12 observed with the placement of the P2A between the CD19 CAR and the IL12 in the OT-001357 (OT-CD19-IL12-010) resulted in IL12 levels comparable to OT-001442 (OT-IL12-096) construct, which expresses IL12 constitutively. As expected, the OT-001407 (OT-CD19-063) construct did not show any expression of IL12.

[0739] To test the ability of biocircuits described herein to regulate the expression of IL12, OT-001386 OT-CD19-IL12-011) and OT-001387 OT-CD19-IL12-013) constructs were treated with Shield1 or vehicle control for 17 hours. The experiments were performed in T cells in a manner similar to those described for FIG. 1. The IL12 levels obtained were compared to the IL12 levels obtained with OT-001356 (OT-CD19-IL12-009), which expresses IL12 constitutively; OT-001407 (OT-CD19-063), which expresses CD19 CAR constitutively; and the pELNS empty vector (referred to as pELNS-001). As shown in FIG. 2, Shield-1 regulates IL12 production in both OT-001386 (OT-CD19-IL12-011) and OT-001387 (OT-CD19-IL12-013), wherein the payloads were separated by P2A and IRES respectively. Ligand dependent expression of IL23 was higher with OT-001387 (OT-CD19-IL12-013)—about 800 pg/ml and about 10-20 pg/ml with OT-001386 (OT-CD19-IL12-011).

[0740] The use of the P2A resulted in lower levels of expression of IL12, both in the presence and absence of Shield 1. Taken together, these data show that IL12 levels can be tuned using biocircuits described herein by the use of P2A sites and/or SREs.

### Example 5. Ligand Dependent Regulation of CD19 CAR-IL12 Tandem Constructs in 293T Cells

[0741] pELDS vector based tandem CD19 CAR-IL12 constructs i.e., OT-001386, OT-001387 were transfected into HEK293T cells for 24 hours. Cells were then treated with Shield 1 for 48 hours. The surface expression of CD19 CAR was measured by FACS using CD19 Fc and IL12 was measured using the p40 MSD assay. The expression of the regulatable tandem constructs was compared to constitutively expressed tandem constructs, OT-001356 and OT-001357; the constitutively expressed monocistronic constructs, OT-001407; and negative controls including the empty vector (pELDS) and the parental HEK293T cells. IL12 levels were induced by Shield-1 treatment in OT-001386 and OT-001387. The induction of IL12 was greater in OT-001387, however, the basal levels of IL12 in the absence of ligand was much lower in OT-001386. As expected, the constitutive tandem constructs showed high expression of IL12 and the negative controls did not show IL12 expression.

[0742] The percentage of cells with CD19 CAR surface expression obtained for each group is shown in Table 11.

TABLE 11
Percentage CAR positive cells

| | | % CAR |
|---|---|---|
| Construct | Shield 1 | expression |
| OT-001386 | + | 30.7 |
| | − | 33.2 |
| OT-001387 | + | 34.7 |
| | − | 35.7 |
| OT-001356 | − | 33.3 |
| OT-001357 | − | 36.1 |
| OT-001407 | − | 36.8 |
| Vector | − | 0.75 |

[0743] As expected, no increase in CAR expression was observed with the addition of ligand to the tandem CD19-IL12 construct expressing cells, since the CAR is not appended to DD.

[0744] Tandem CD19 CAR-IL12 constructs, where IL12 is regulated by hDHFR DDs were tested in HEK293T cells. Cells were plated at 1 million cells per well and transiently transfected with 1 μg of DNA/well. At 24 hours, the media was changed and replaced with media containing 50 μM TMP. After 48 hours, the supernatants were collected and utilized for the IL12 p40 MSD assay. Regulation of IL12 in the tandem constructs was compared to constitutively expressed tandem construct, OT-001356, regulated IL12 monocistronic constructs OT-001444, OT-001446 as well the constitutively expressed monocistronic IL12 construct, OT-001442.

[0745] OT-001613 construct showed three-fold upregulation in IL12 levels in the ligand treated samples as compared to the untreated control, OT-001614 and OT-001616 showed 1.3-fold and 2-fold upregulation in IL12 in ligand treated samples as compared to the untreated. All DHFR based tandem CD19 CAR-IL12 (Table 29) constructs showed regulation of IL12 in the presence of TMP. The basal expression of IL12 observed with the DHFR regulated tandem constructs was much lower when compared to the corresponding monocistronic DHFR regulated IL12 constructs.

TABLE 12
IL12 levels

| | IL12p40 pg/mL | | | |
|---|---|---|---|---|
| Construct | Ligand | | Vehicle | |
| OT-001442 | — | — | 4693321 | 4613343 |
| OT-001444 | 390606.3 | 381446.7 | 196977.6 | 196000 |
| OT-001446 | 1124950 | 1136322 | 215323.9 | 199243.6 |
| OT-001356 | — | — | 127453.7 | 125010.8 |
| OT-001612 | 16911.73 | 17115.21 | 2483.863 | 2201.019 |
| OT-001615 | 51692.83 | 53613.26 | 10066.25 | 9930.337 |
| OT-001618 | 158125.8 | 162826.1 | 16453.51 | 16807.98 |

[0746] Additional hDHFR and ecDHFR based tandem CD19 CAR-IL12 constructs were also tested and ligand dependent regulation was observed in all instances as shown in Table 13.

TABLE 13
Regulatable DHFR construct

| | Fold | |
|---|---|---|
| | induction | % CAR |
| Construct | in IL12 | expression |
| OT-001620 | 3 | 31 |
| OT-001621 | 3 | 38 |
| OT-001617 | 40 | 20 |
| OT-001622 | 12 | 26 |

### Example 6. Ligand Dependent Regulation of CD19 CAR-IL12 Tandem Constructs in the Presence of Antigen

[0747] The regulation of IL12 in CD19 CAR IL12 constructs in the presence of the CD19 antigen was measured to assess IL12 regulation in the presence of antigen—an environment likely encountered by the T cells in vivo. ecDHFR and hDHFR constructs were transduced into T cells as previously described. T cells were then co-cultured with K562 cells engineered to ectopically express CD19 or with parental K562 cells that have little to no expression of CD19. Each group was further sub divided into a TMP group, in which the cells were dosed with 50 μM TMP or the and a control group where the cells were left untreated. The cell surface expression of CAR was measured using CD19-Fc and the IL12 levels were measured using MSD assay. The results are shown in Table 31. The fold induction as represented in Table 24 is with reference to the IL12 levels in the absence of ligand.

TABLE 14
IL12 induction in the presence of antigen

| | Fold induction in IL12 | | |
|---|---|---|---|
| | Parental- | CD19 | % CAR |
| Construct | K562 | K562 | expression |
| OT-001619 | 5 | 4 | 22.9 |
| OT-001620 | 5 | 4 | 31 |
| OT-001621 | 10 | 7 | 38 |
| OT-001617 | 30 | 40 | 20% |
| OT-001622 | 30 | 40 | 26% |

[0748] As shown in Table 14, IL12 regulation was observed both in the presence and absence of antigen. The ecDHFR constructs showed even higher induction of IL12 in the presence of antigen as compared to the absence of the antigen. The presence of antigen was however required for the interferon gamma and IL2 induction. CAR expressing T cells that produce >20-50 pg/mL levels of IL12 also demonstrate higher IFN gamma than IL12 negative CAR-T cells. CAR expression was also found to positively correlate with IFN gamma and IL2 production.

### Example 7. Anti-Tumor Activity of Tandem CD19-IL12 CARs

[0749] The study was designed to determine how IL12 increased the rejection of Nalm-6 tumors by CD19 CAR expressing T cells and whether the presence of the antigen affects IL12 production by CAR T cells in tumor bearing and/or non-tumor bearing mice.

[0750] To test in vitro activity, T cells were transduced with one of the following constructs OT-001407, OT-001356, OT-001357, OT-001442 or empty vector, pELDS. The in vitro activity of the T cells expressing these constructs was measured by co culturing them with antigen positive, CD19 expressing K562 cells or antigen negative parental K562 cells. As a control T cells that were not co-cultured with any K562 cells were also used. On day 7 after co culture, CAR-IL12 tandem constructs produced more IFN gamma levels than OT-001407 only or OT-001442 constructs. Secreted IL2 levels were highest in OT-001407 transduced T cells, followed by the CAR-IL12 tandem constructs. In contrast, the highest level of secreted IL12 was observed in OT-001442, followed by OT-001357 and then OT-001356. Thus, IL12 expression does not completely correlate with IFN gamma levels, indicating that an interaction between CD19 CAR expression and IL12 expression may be responsible for the synergistic effect on the IFN gamma expression.

[0751] To test in vivo activity, experiments were performed in NSG mice. Nalm6 cells were transfected with Redifect Red-Fluc-GFP (Perkin Elmer) under selection using Puromycin at 2 μg/ml for approximately 2 months in order to generate a line that stably expresses the luciferase reporter; thereafter named Nalm6-Luc. Ten days before tumor implantation, cells were thawed and cultured in puromycin containing media. On the day of the injection (day 0), cells were counted, resuspended in PBS and injected into NSG mice via tail vein injection at 1 million per injection. On day 6, mice were imaged for bioluminescent intensity and sorted into groups based on their tumor size ensure that all groups had approximately the same sized tumors. T cells were injected on day 7 at either 0.1 or 1 million cells per injection. The T cells were transduced with one of the following constructs OT-001356 (IRES), and OT-001357 (P2A) prior to the injection. To assess antitumor activity of the tandem constructs to their corresponding monocistronic constructs, OT-001407 and OT-001442 were also included. Additional controls included cells transduced with the empty vector, pELDS and untransduced cells. Mice that were alive at day 68 (which included mice in the 0.1e⁶ CD19 CAR-IL12 constructs groups) were re-challenged with similar doses of T cells. Tumors were monitored in mice using bioluminescent imaging using which the mean of the Total Flux (photons/second) was measured as an indicator of tumor burden (Table 32). In Table 15, UTD indicates untreated group and pELDS is the empty vector control group.

TABLE 15
Total Flux in tumor bearing mice

| | | | OT-001442 | | OT-001407 | | OT-001356 | | OT-001357 | |
|---|---|---|---|---|---|---|---|---|---|---|
| Day | UTD | pELDS | 0.1e⁶ | 1.0e⁶ | 0.1e⁶ | 1.0e⁶ | 0.1e⁶ | 1.0e⁶ | 0.1e⁶ | 1.0e⁶ |
| 6 | 1.50E+06 | 1.48E+06 | 1.43E+06 | 1.42E+06 | 1.46E+06 | 1.51E+06 | 1.57E+06 | 1.38E+06 | 1.67E+06 | 1.92E+06 |
| 10 | 1.56E+07 | 1.94E+07 | 9.79E+06 | 1.31E+07 | 7.80E+06 | 3.87E+06 | 2.17E+07 | 1.06E+07 | 2.64E+07 | 3.45E+07 |
| 14 | 5.20E+08 | 4.39E+08 | 5.35E+08 | 4.64E+08 | 1.08E+08 | 1.06E+07 | 7.10E+08 | 2.49E+08 | 4.75E+08 | 1.16E+08 |
| 18 | 2.49E+09 | 2.51E+09 | 3.18E+09 | 3.04E+09 | 2.85E+08 | 1.41E+07 | 2.63E+09 | 3.04E+08 | 2.21E+09 | 2.05E+07 |
| 21 | 4.93E+09 | 3.15E+09 | 5.00E+09 | 4.28E+09 | 5.50E+08 | 3.55E+07 | 4.43E+09 | 1.64E+07 | 1.99E+09 | 1.17E+06 |
| 24 | 7.91E+09 | 5.90E+09 | 1.57E+10 | 1.86E+10 | 1.00E+09 | 1.03E+08 | 4.62E+09 | 8.21E+05 | 1.80E+09 | 9.36E+05 |
| 27 | — | — | — | — | — | 3.92E+08 | 1.35E+10 | 1.14E+06 | 8.47E+08 | 8.92E+05 |
| 31 | — | — | — | — | — | 1.48E+09 | — | 7.17E+05 | 1.61E+08 | 9.75E+05 |
| 34 | — | — | — | — | — | 4.19E+09 | — | 1.41E+06 | 9.44E+07 | 1.00E+06 |
| 38 | — | — | — | — | — | 3.40E+09 | — | 1.06E+06 | 1.49E+08 | 1.07E+06 |
| 41 | — | — | — | — | — | 5.91E+09 | — | 1.56E+06 | 2.28E+08 | 1.58E+06 |
| 45 | — | — | — | — | — | 2.02E+09 | — | 1.18E+06 | 3.15E+08 | 1.48E+06 |
| 48 | — | — | — | — | — | 2.10E+09 | — | 2.03E+06 | 3.65E+08 | 1.33E+06 |
| 52 | — | — | — | — | — | 3.87E+09 | — | 2.10E+06 | 7.62E+08 | 1.14E+06 |
| 55 | — | — | — | — | — | 5.76E+09 | — | 8.07E+05 | 4.63E+08 | 6.59E+05 |
| 60 | — | — | — | — | — | — | — | 5.44E+05 | 3.95E+08 | 6.57E+05 |
| 63 | — | — | — | — | — | — | — | 5.82E+05 | 4.78E+08 | 4.41E+05 |
| 67 | — | — | — | — | — | — | — | 7.32E+05 | 4.72E+08 | 6.77E+05 |
| 70 | — | — | — | — | — | — | — | 6.31E+05 | — | 6.89E+05 |
| 73 | — | — | — | — | — | — | — | 5.64E+05 | — | 6.03E+05 |
| 76 | — | — | — | — | — | — | — | 7.15E+05 | — | 6.26E+05 |
| 80 | — | — | — | — | — | — | — | 7.56E+05 | — | 9.39E+05 |
| 83 | — | — | — | — | — | — | — | 7.73E+05 | — | 6.86E+05 |

[0752] As shown in Table 15, constitutive IL12 expression in CD19 positive CART cells (i.e. the CD19 CAR IL12 tandem constructs) caused a robust anti-tumor effect at the 1e⁶ dose. OT-001357 (P2A) displayed superior killing compared to OT-001356 (IRES) at the 0.1e⁶ (lower dose). Percent survival was also measured for each group during the course of the experiment and the following numbers were obtained (i) UTD: 0% survival at day 28 (ii) pELDS: 0% survival at day 29 (iii) 0.1e⁶ OT-001442:0% survival at day 24 (iv) 1e⁶ OT-001442:0% survival at day 24 (v) 0.1e⁶ OT-001407:0% survival at day 30 (vi) 1.0e⁶ OT-001407:0% survival at day 60 (vii) 0.1e⁶ OT-001356:0% survival at day 30 (viii) 1.0e⁶ OT-001356:87.5% survival at day 83 (ix) 0.1e⁶ OT-001357:0% survival by day 72 (x) 1.0e⁶ OT-001357:62.5% survival at day 83. Thus, the co-delivery of IL12 with CD19 positive CAR T cells using the tandem constructs resulted in a significant improvement in survival, particularly at the 1.0e⁶ T cell dose.

[0753] Weekly serial whole blood and plasma collections were made to assess T cell populations and cytokine production. MSD assays were carried out to measure the levels of IFN gamma and IL12. The IL12 levels begin to rise after the T cell injection with the 1e⁶ OT-001357, and the IL12 levels obtained with 1e⁶ OT-001356 was ten-fold less than the former. Despite these differences in the IL12 levels, comparable levels of IFN gamma were obtained with both constructs, with the 1e⁶ OT-001356 construct producing higher IFN gamma than the 1e⁶ OT-001357. IFN gamma levels were also detectable with the 0.1e⁶ injections of the two constructs. In all constructs, the levels of IFN gamma continued to increase over time, even when the IL12 levels began to decrease.

### Example 8. In Vivo Characterization of T Cell Phenotypes in Constitutive IL12 CD19 Constructs

[0754] IL12-transduced T cells have a Th1-skewed phenotype in vitro, i.e. produce IFN gamma). To assess phenotypic effects of IL12 in vivo, GFP positive (IL12 negative) cells were generated and co-transferred with CD19 CAR-IL12 transduced cells or CD19 alone or IL12 alone cells. Nalm 6 tumor bearing NSG mice were injected with 8 million GFP positive cells, in addition to CD19 CAR-IL12 cells or their corresponding monocistronic constructs. The groups utilized in this study included, 1e⁶ empty vector expressing T cells plus 8e⁶ GFP positive cells, 1e⁶ OT-001407 plus 8e⁶ GFP positive cells, 0.1 e⁶ OT-001356 plus 8e⁶ GFP positive cells, 1e⁶ OT-001356 plus 8e⁶ GFP positive cells, 0.1e⁶ OT-001357 plus 8e⁶ GFP positive cells, 1e⁶ OT-001357 plus 8e⁶ GFP positive cells, and 1e⁶ OT-001442 plus 8e⁶ GFP positive cells.

[0755] Animals were bled on day 3, day 5, day 7 and euthanized at day 12. Blood, spleen, and bone marrow were collected for analysis of T cell number and CD8 frequency. Phenotypic T cell markers such as Granzyme, Tbet, pSTAT4, CD25, and ICOS were analyzed in the GFP positive cells using FACS. At day 3, 5 and 7, the GFP positive cells co-transferred with CD19 CAR-IL12 constructs showed an increase in Granzyme B and Tbet. By day 12, post transfer, the levels of Granzyme B, Tbet, pSTAT4, CD25 and ICOS levels increased in the blood of the mice injected with the CD19 CAR-IL12 tandem constructs. ANOVA test for significance was p<0.0001 for all markers. Concomitant measurement of plasma IL12 showed that the plasma IL12 levels correlated with dose of the tandem CAR-IL12 constructs. Further, even a level of IL12 as low as 200 pg/ml (EC 50 of IL12 in plasma is ˜100 pg/ml) was sufficient to induce phenotypic changes as measured by the markers described above and by the increase in IFN gamma levels.

[0756] At day 12 after T cell transfer, the frequency of human T cells in the blood increased over time and increased to a greater level in groups with higher levels of IL12, including groups that were dosed with CD19 CAR-IL12 constructs. The frequency of human T cells that were GFP positive dropped in groups that received CD19-CAR either in tandem constructs or as a monocistronic construct, suggesting that CAR expressing T cells were expanding more than other T cells. The largest reduction in GFP positive cell frequency was in the groups that received the high dose of CAR positive cells with IL12 namely the 1e⁶ OT-001356 (IRES) injected group. Among the human cells, the percentage of CD8 positive cells increased over time in mice expressing IL12 either in monocistronic constructs or in tandem with CD19 CAR.

### Example 9. Anti-Tumor Activity of Tandem CD19-IL15-IL15Ra CARs

[0757] The purpose of the study was to determine if membrane bound IL15-IL15Ra, when present in a tandem construct, could enhance the activity of CD19 CARs to reduce tumor growth. Nalm-Luc cells were generated as described before. Ten days before tumor implantation, cells were thawed and cultured in puromycin containing media. On the day of the injection (day 0), cells were counted, resuspended in PBS and injected into NSG mice via tail vein injection at 1 million per injection. On day 6, mice were imaged for bioluminescent intensity and sorted into groups to ensure that all the groups have the same average tumor burden. Different doses of T cells were injected on day 7 at 0.13 or 0.38 or 1.13 million cells per injection. The cells were transduced with OT-001458(P2A) construct. To assess antitumor activity of the tandem construct to its corresponding monocistronic constructs, T cells expressing OT-001407 and OT-001422 individually or OT-001407 alone were also included. Additionally, untransduced cells were included as a negative control. Tumors were monitored in mice using bioluminescent imaging using which the mean of the Total Flux (photons/second) was measured as an indicator of tumor burden. As shown in Table 16, cohorts of mice injected with different doses of the tandem construct showed a reduction in the total flux measured during the course of the experiment. The least value of total flux was obtained for the highest dose (1.13 million T cells) of OT-001458(P2A) construct, followed by the lowest does of 0.13 million T cells. The 0.13 million T cell dose initially showed a reduction in photon flux till about day 30, but after day 30 displayed an upward trend in photon flux indicating relapse of the Nalm6 tumors. About 80% of the animals in the 1.13 million OT-001458(P2A) construct group survived at day 50, while the 0.13 million and 0.38 million dose groups of OT-001458(P2A) construct showed 0% survival at day 50. All other groups tested including untransduced T cell group, the OT-001407 CAR group and the group comprising T cells co-transduced with OT-001407 and OT-001422, showed 0% survival by day 35. In Table 16, Utd refers to untransduced.

TABLE 16
Total Flux in tumor bearing mice

| | | Utd + | | | | | | | | | |
|---|---|---|---|---|---|---|---|---|---|---|---|
| | | OT- | | | | | | | OT-001407 + | | |
| | Utd | 001422 | OT-001407 | | | OT-001458 | | | OT-001422 | | |
| Days | — | — | 0.13E+06 | 0.38E+06 | 1.13E+06 | 0.13E+06 | 0.38E+06 | 1.13E+06 | 0.13E+06 | 0.38E+06 | 1.13E+06 |
| 6 | 1.00E+06 | 1.00E+06 | 1.01E+06 | 1.00E+06 | 1.01E+06 | 1.04E+06 | 1.04E+06 | 1.03E+06 | 1.02E+06 | 1.03E+06 | 1.07E+06 |
| 9 | 2.72E+06 | 4.55E+06 | 4.40E+06 | 3.11E+06 | 5.18E+06 | 4.44E+06 | 4.17E+06 | 4.60E+06 | 4.71E+06 | 9.28E+06 | 8.11E+06 |
| 13 | 7.1E+07 | 9.40E+07 | 6.21E+07 | 5.88E+07 | 5.10E+07 | 5.13E+07 | 2.64E+07 | 4.34E+06 | 9.70E+07 | 1.08E+08 | 8.61E+07 |
| 16 | 4.47E+08 | 4.66E+08 | 4.73E+08 | 2.13E+08 | 1.96E+08 | 2.93E+08 | 5.22E+07 | 6.08E+06 | 4.25E+08 | 5.84E+08 | 2.82E+08 |
| 20 | 2.78E+09 | 2.80E+09 | 2.13E+09 | 1.16E+09 | 1.10E+09 | 7.81E+08 | 7.58E+07 | 2.24E+06 | 2.78E+09 | 2.06E+09 | 1.16E+09 |
| 23 | 6.58E+09 | 4.50E+09 | 3.47E+09 | 2.20E+09 | 2.07E+09 | 1.75E+09 | 6.89E+07 | 7.06E+05 | 5.23E+09 | 3.14E+09 | 1.60E+09 |
| 27 | — | — | 7.65E+09 | 5.75E+09 | 6.08E+09 | 1.04E+09 | 5.45E+07 | 1.14E+06 | — | 1.19E+10 | 4.39E+09 |
| 30 | — | — | 2.99E+10 | 1.58E+10 | 1.62E+10 | 6.29E+09 | 8.11E+07 | 1.35E+06 | — | 3.19E+10 | 8.28E+09 |
| 34 | — | — | — | — | — | 3.77E+08 | 1.13E+08 | 1.09E+06 | — | — | — |
| 37 | — | — | — | — | — | 1.77E+08 | 6.77E+08 | 1.22E+06 | — | — | — |
| 40 | — | — | — | — | — | 2.00E+08 | 1.50E+09 | 1.12E+06 | — | — | — |
| 44 | — | — | — | — | — | 5.81E+08 | 3.72E+09 | 2.37E+06 | — | — | — |
| 48 | — | — | — | — | — | 7.97E+08 | 3.30E+09 | 1.62E+06 | — | — | — |
| 50 | — | — | — | — | — | 1.43E+09 | 5.84E+09 | 2.57E+06 | — | — | — |
| 55 | — | — | — | — | — | — | — | 1.30E+07 | — | — | — |
| 58 | — | — | — | — | — | — | — | 3.18E+07 | — | — | — |
| 62 | — | — | — | — | — | — | — | 6.12E+07 | — | — | — |
| 64 | — | — | — | — | — | — | — | 4.66E+07 | — | — | — |

### Example 10. CD19 CAR-IL12 Tandem Construct Expression and Function in the Presence of Antigen

[0758] Cytokine production CD19 CAR IL12 constructs in the response to antigen was measured. On day 0, primary human T cells were stimulated with Dynabeads (T-expander CD3/CD28) at a 3:1 bead: cell ratio in media containing 10% fetal bovine serum (FBS). The next day, T cells were transduced with lentivirus produced with constructs OT-001407, or OT-001356. On day 2, the cells were diluted 1:2 with fresh 10% FBS media. On day 6, the cells were counted for equal cell number plating, and media was replaced. Transduction efficiency was analyzed on day 7 by flow cytometry using CD19-Fc to detect surface CAR expression. Cytokines that had accumulated in the overnight culture supernatants (from 100,000 cells per 200 uL media) were measured using human IL12p70 (and/or human interferon-gamma) MSD V-plex assay kits (Meso Scale Discovery). IL12 p70 expression on day 7 of expansion was approximately 200 pg/ml with OT-001356, whereas little to no expression was observed with OT-001407.

[0759] T cells were co-cultured with K562 cells ectopically expressing CD19 antigen. In the presence of CD19 antigen increased IL12 production by 2-fold in OT-001356 expressing T cells. Interferon gamma levels increased 2.5 fold in OT-001356 compared to OT-001407 expressing T cells suggesting that IL12 leads to increased Interferon gamma production in CAR-T cells. A 3 fold reduction in IL2 levels in OT-001356 expressing T cells compared to OT-001407 expressing T cells was also observed.

[0760] Independent populations of T cells were transduced with varying dilutions of virus corresponding to OT-001356, OT-001407, OT-001992, or OT-001386 and co-cultured with K562 parental or CD19 expressing K562 cells. T cells were treated with 1 μM Shield-1 for 17 hours following which, IL12 (p70) levels and CD19 CAR expression were measured. OT-001386 OT-CD19-IL12-011) showed ligand dependent regulation of IL12 at all virus dilutions tested (2 and 10 μL). When co-cultured with parental K562 cells, approximately 10-15 fold induction in IL12 levels compared to vehicle control was observed. When co-cultured with CD19 expressing K562 cells, a 25 fold induction in IL12 expression was observed with the 2 μL virus dilution and a 17 fold induction in IL12 expression (compared to the untreated DMSO control) was observed. Little to no expression of IL12 was observed with the OT-001992 under any of the experimental conditions described herein i.e. plus or minus ligand; plus or minus CD19 expressing K562 cells. The percentage of cells expressing CAR in OT-001386 OT-CD19-IL12-011) expressing T cells was approximately 5.5-6.08% and approximately 2.45-3.83 percent in OT-001992 expressing T cells.

### Example 11. DHFR Regulated CD19-CAR-IL12 Constructs

[0761] On day 0, primary human T cells were stimulated with Dynabeads (T-expander CD3/CD28) at a 3:1 bead: cell ratio in media containing 10% fetal bovine serum (FBS). The next day, lentivirus produced with construct OT-001356, OT-001407, OT-001612, OT-001615, OT-001618 were added in the presence of reduced serum (5% FBS). On day 2, the cells were diluted 1:2 with fresh 10% FBS media. On day 6, the cells were counted to ensure equal cell number plating, and media replaced. In some instances, cells are treated with 50 μM TMP or treated in the absence or presence of antigen re-stimulation (with human Immunocult soluble CD3/CD28 reagent from StemCell Technologies or with parental K562 cells versus K562 cells stably expressing the CAR antigen CD19 at a E:T ratio of 1:2). On day 7, after overnight incubation, transduction efficiency was analyzed by flow cytometry using CD19-Fc to detect surface CAR expression. Cytokine that had accumulated in the overnight culture supernatants (from 100,000 cells per 200 uL media) were measured using human IL12p70 (and/or human interferon-gamma) MSD V-plex assay kits (Meso Scale Discovery). The results are shown in Table 14. The “fold change with TMP” column indicates the fold change in IL12 levels with TMP treatment when compared to the vehicle control values (pg/ml).

TABLE 14
IL12 and CAR expression

| | IL12 expression | | | | |
|---|---|---|---|---|---|
| | Parental K562 | | CD19-K562 | | |
| | Vehicle | Fold | Vehicle | Fold | % CAR |
| | control | change | control | change | positive |
| Construct ID | (pg/ml) | with TMP | (pg/ml) | with TMP | cells |
| OT-001612 | 1 | 9 | 4 | 4 | 10.4 |
| OT-001615 | 1 | 6 | 3 | 3 | 8.40 |
| OT-001618 | 1 | 5 | 2 | 5 | 7.18 |

[0762] As shown in Table 17, ligand dependent regulation of IL12 was observed with all constructs tested. Little to no IL12 expression was observed with OT-001407 and high levels of IL12 were observed with OT-001356 construct.

[0763] Similar experiments were performed with human DHFR regulated CD19CAR-IL12 constructs. The results are shown in Table 35. In Table 35 “—” indicates approximate IL12 values. The “fold change with TMP” column indicates the fold change in IL12 levels with TMP treatment when compared to the vehicle control values (pg/ml)

TABLE 18
IL12 and CAR expression

| | IL12 expression | | | | |
|---|---|---|---|---|---|
| | Parental K562 | | CD19-K562 | | |
| | Vehicle | Fold | Vehicle | Fold | % CAR |
| | control | change | control | change | positive |
| Construct ID | (pg/ml) | with TMP | (pg/ml) | with TMP | cells |
| OT-001619 | 90 | 5 | ~275 | 4 | 29 |
| OT-001620 | 130 | 5 | ~300 | 4 | 23.8 |
| OT-001621 | 20 | 10 | 50 | 7 | 9.28 |
| OT-001617 | 0.3 | 30 | 0.6 | 40 | 6.8 |
| OT-001622 | 20 | 70 | 70 | 40 | 21 |

[0764] All constructs tested showed ligand and antigen dependent expression of IL12. OT-001621 and OT-001622 were considered for in vivo characterization as they demonstrated strong CAR expression as well tunable expression of IL12 in the presence of TMP and low basal expression of IL12 in the absence of TMP.

[0765] Constructs shown in Table 19 were transduced into T cells using methods described herein. T cells were then treated increasing doses of TMP (also shown in Table 19) for 23 hours and human IL12p70 was analyzed by MSD V-plex assay kits (Meso Scale Discovery). The results are shown in Table 19.

TABLE 19
TMP dose response

| TMP Concentration | OT- | OT- | OT- | OT- | OT- | OT- |
|---|---|---|---|---|---|---|
| (μM) | 001407 | 001357 | 001619 | 001620 | 001621 | 001622 |
| 100.0000 | 0.1724 | 1339.48 | 54.118 | 108.718 | 174.47 | 194.33 |
| 50.0000 | 0.1803 | 1456.46 | 45.475 | 93.986 | 147.48 | 191.32 |
| 16.6667 | 0.1529 | 1339.09 | 34.163 | 72.579 | 105.09 | 186.57 |
| 5.5556 | 0.0000 | 1472.32 | 25.482 | 56.034 | 57.867 | 173.62 |
| 1.8519 | 0.1724 | 1525.97 | 25.749 | 51.543 | 44.655 | 144.99 |
| 0.6173 | 0.0000 | 1454.19 | 20.950 | 42.869 | 34.011 | 116.79 |
| 0.2058 | 0.0000 | 1548.31 | 21.650 | 39.186 | 30.550 | 70.402 |
| 0.0686 | 0.0000 | 1460.43 | 21.190 | 39.578 | 28.198 | 41.929 |
| 0.0229 | 0.1529 | 1476.81 | 20.310 | 42.142 | 28.843 | 25.205 |
| 0.0076 | 0.0000 | 1631.58 | 20.283 | 39.103 | 29.831 | 12.5051 |
| 0.0025 | 0.1842 | 1560.01 | 20.820 | 42.375 | 26.997 | 7.7922 |
| 0.0001 | 0.2569 | 1294.83 | 19.955 | 38.719 | 27.232 | 4.7976 |

[0766] About a 3-fold increase in IL12 levels were observed with OT-001621 with increasing TMP doses, whereas OT-001622 showed a 6-fold induction over the TMP dose range tested. The EC50 values were calculated as OT-001619 (130 μM); OT-001620 (65 μM); OT-001621 (25 μM); OT-001622 (0.45 μM). These EC50 values are within the reported human exposure ranges for TMP depending on the dose regime selected i.e. 80-160 mg BID (twice a day) PO (oral) dosing: 1-6 μM steady state levels and 150 mg/m2 IV (intravenous) dosing every 8 hours: 17-34 μM maximum peak levels.

### Example 12. In Vivo Anti-Tumor Activity of Tandem CD19-IL12 CAR

[0767] The study was designed to determine how a basal expression of IL12 produced by a CD19 targeting CAR (CD19-CAR) T cells is able to: (a) increase expansion of CD19-CAR T cells, (b) increase IFNg production by CD19-CAR T cells in vivo, and (c) enhance anti-tumor efficacy of CAR⁺ T cell dose against CD19+ Nalm6 tumors. To test in vivo anti-tumor activity, experiments were performed in NSG mice. Nalm6 cells were transfected with Redifect Red-Fluc-GFP (Perkin Elmer) and selected using Puromycin for 2 months to generate a cell line that stably expressed the luciferase reporter; hereafter named Nalm6-Luc. Ten days before tumor implantation, Nalm6-Luc cells were thawed and cultured in puromycin-containing media. On day 0, cells were counted, resuspended in PBS and injected into NSG mice via tail vein. On day 6, mice were imaged for bioluminescent intensity (BLI) and sorted into groups based on their tumor size ensure that all groups had the same sized tumors. Human T cells were transduced with one of the following constructs: OT-001356, OT-001407, OT-001442, OT-001617, empty vector. Next, keeping total CARP T cell dose constant at 1 million cells per animal, OT-001407 were mixed with different amounts of OT-001356 transduced T cells (IL12+ cell dose titration, indicated in Table 20. In Table 20, “M” indicates million. In Table 20 and Table 21, “sIL12” indicates soluble IL12 which is recombinant human IL12 also referred to herein as “hIL12.”

TABLE 20
Dose groups of mice infused with T cells

| | | | # CD19car- | |
|---|---|---|---|---|
| | | # CD19- | IRES- | Total |
| | | CAR+ | IL12+ | Dose |
| Group Purpose | Group | OT-001407 | OT-001356 | Cell |
| IL12 titration | 1 | Empty Vector (pELDS-001) | | 3.33M |
| | | cells only (low total cell dose) | | |
| with 1M total CAR+ cells | 2 | 1M | — | |
| | 3 | 0.997M | 3,000 | |
| | 4 | 0.99M | 10,000 | |
| | 5 | 0.97M | 30,000 | |
| | 6 | 0.9M | 100,000 | |
| | 7 | 0.7M | 300,000 | |
| | 8 | — | 1M | |
| Control for phenotype changes in | 9 | 1M CAR-T | — | 3.33M |
| CAR-T during in vitro expansion with | | expanded with | | |
| IL12 | | sIL12 | | |

| | | | |
|---|---|---|---|
| Control for IL12 exposure in vivo | 10 | 1M IL12+ cells without CAR | |
| without CAR | | (OT-001442) | |
| Test construct with lowest basal IL12 | 11 | 1M CD19car-IRES-IL12- | 13.33M |
| for lack of off-state in vivo efficacy | | ecDHFR (OT-001617) | |
| Controls for group 11 | 12 | 1M CD19-CAR+ cells (OT- | |
| | | 001407 (high total cell dose) | |
| | 13 | Empty Vector (pELDS) cells | |
| | | only (high total cell dose) | |

[0768] Tumors were monitored in mice using BLI and the mean of the Total Flux (photons/second) was calculated for each group as an indicator of tumor burden (Table 38 and Table 39).

TABLE 21
Total Flux in tumor bearing mice after infusion of mixture of CD19-CAR
expressing human T cells and CD19-CAR-IL12 expressing T cells
Dose titration of OT-001407 plus OT-001356 (Cell # x e6)

| | | 0.997e6 | 0.99e6 | 0.97e6 | 0.97e6 | | 0.7e6 |
|---|---|---|---|---|---|---|---|
| | | OT- | OT- | OT- | OT- | | OT- |
| Days | 1.0e6 OT- | 001407 + | 001407 + | 001407 + | 001407 + | 0.9e6 OT- | 001407 + |
| Post | 001407 | 0.003e6 | 0.01e6 | 0.03e6 | 0.03e6 | 001407 + | 0.3e6 |
| Tumor | (lower | OT- | OT- | OT- | OT- | 0.1e6 OT- | OT- |
| Implant | cell dose) | 001356 | 001356 | 001356 | 001356 | 001356 | 001356 |
| 6 | 2.7E+06 | 2.7E+06 | 2.7E+06 | 2.7E+06 | 2.7E+06 | 2.7E+06 | 2.7E+06 |
| 13 | 1.4E+06 | 9.6E+05 | 9.1E+05 | 2.2E+06 | 2.2E+06 | 1.1E+06 | 1.2E+06 |
| 20 | 8.8E+05 | 6.8E+05 | 6.8E+05 | 8.0E+05 | 8.0E+05 | 6.0E+05 | 6.9E+05 |
| 27 | 2.0E+06 | 6.2E+05 | 6.8E+05 | 7.5E+05 | 7.5E+05 | 7.4E+05 | 7.4E+05 |
| 33 | 1.4E+07 | 6.9E+05 | 7.7E+05 | 7.5E+05 | 7.5E+05 | 6.8E+05 | 7.6E+05 |
| 40 | 4.6E+08 | 7.1E+05 | 7.3E+05 | 8.2E+05 | 8.2E+05 | 7.8E+05 | 7.9E+05 |
| 43 | 4.1E+09 | 6.8E+05 | 8.1E+05 | 6.8E+05 | 6.8E+05 | 7.3E+05 | 7.8E+05 |
| 47 | 8.2E+09 | 7.1E+05 | 6.6E+05 | 6.5E+05 | 6.5E+05 | 6.6E+05 | 6.1E+05 |

TABLE 22
Total Flux in tumor bearing mice after infusion of CD19-CAR, ILI2 or CD19-CAR-IL12
expressing human T cells
Controls (for groups in Table 38)

| | | | | | | | 1.0e6 |
|---|---|---|---|---|---|---|---|
| | | | | | | | OT- |
| Days | pELDS | pELDS- | | 1.0e6 | | | 001407 |
| Post | (lower | (higher | 1.0e6 | OT- | 1.0e6 | 1.0e6 | (higher |
| Tumor | cell | cell | OT- | 001407 + | OT- | OT- | cell |
| Implant | dose) | dose) | 001356 | hIL12 | 001442 | 001617 | dose) |
| 6 | 2.7E+06 | 2.7E+06 | 2.7E+06 | 2.7E+06 | 2.7E+06 | 2.7E+06 | 2.7E+06 |
| 13 | 5.6E+08 | 5.0E+08 | 5.2E+07 | 4.5E+08 | 4.5E+08 | 1.1E+06 | 1.2E+06 |
| 20 | 7.0E+09 | 7.5E+09 | 6.8E+05 | 4.2E+09 | 9.2E+09 | 1.2E+06 | 9.8E+05 |
| 27 | — | — | 7.7E+05 | 1.1E+10 | — | 7.7E+05 | 1.6E+06 |
| 33 | — | — | 7.7E+05 | — | — | 8.3E+05 | 5.6E+06 |
| 40 | — | — | 8.4E+05 | — | — | 8.1E+05 | 2.3E+08 |
| 43 | — | — | 7.3E+05 | — | — | 7.7E+05 | 1.3E+09 |
| 47 | — | — | 7.5E+05 | — | — | 7.2E+05 | 6.1E+08 |

[0769] As shown in Table 21 co-delivery of any amount of IL12-CAR⁺ T cells tested (as low as 3000 IL12-CAR+ T cells mixed with 0.979e6 CARP T cells) was sufficient to control tumor growth in vivo. Importantly, tumor regression was also observed in mice infused with T cell transduced with OT-001617 in the absence of ligand treatment, suggesting that the low basal level of IL12 produced by T cell transduced with this vector is sufficient to control tumor burden (Table 39). In contrast, recipients of T cells transduced with either CAR or IL12 monocistronic lentivirus vectors did not control tumor growth (Table 22). Percent survival was also measured for each group during the course of the experiment and the numbers shown in Table 23 were obtained.

TABLE 23
Percent Survival

| | Days Post Tumor Implant | | | | | | | | | | | |
|---|---|---|---|---|---|---|---|---|---|---|---|---|
| Construct | 0 | 20 | 21 | 22 | 23 | 25 | 26 | 27 | 29 | 43 | 44 | 47 |
| pELDS (lower | 100 | 87.5 | 50 | 12.5 | 0 | — | — | — | — | — | — | — |
| cell dose) | | | | | | | | | | | | |
| 1.0e6 OT- | 100 | — | — | — | — | — | — | — | — | 87.5 | 75 | 37.5 |
| 001407 (lower | | | | | | | | | | | | |
| cell dose) | | | | | | | | | | | | |
| 0.997e6 OT- | 100 | — | — | — | — | — | — | — | — | — | — | 100 |
| 001407 + | | | | | | | | | | | | |
| 0.003e6 OT- | | | | | | | | | | | | |
| 001356 | | | | | | | | | | | | |
| 0.99e6 OT- | 100 | — | — | — | — | — | — | — | — | — | — | 100 |
| 001407 + 0.01e6 | | | | | | | | | | | | |
| OT-001356 | | | | | | | | | | | | |
| 0.97e6 OT- | 100 | — | — | — | — | — | — | — | — | — | — | 100 |
| 001407 + 0.03e6 | | | | | | | | | | | | |
| OT-001356 | | | | | | | | | | | | |
| 0.9e6 OT- | 100 | — | — | — | — | — | — | — | — | — | — | 100 |
| 001407+ 0.1e6 | | | | | | | | | | | | |
| OT-001356 | | | | | | | | | | | | |
| 0.7e6 OT- | 100 | 87.5 | — | — | — | — | — | — | — | — | — | 87.5 |
| 001407 + 0.3e6 | | | | | | | | | | | | |
| OT-001356 | | | | | | | | | | | | |
| 1.0e6 T-001356 | 100 | — | — | — | — | — | — | — | — | — | — | 100 |
| 1.0e6 OT- | 100 | — | — | — | — | 75 | 50 | 37.5 | 0 | — | — | — |
| 001407+ hIL12 | | | | | | | | | | | | |
| 1.0e6 OT- | 100 | 62.5 | 12.5 | 0 | — | — | — | — | — | — | — | — |
| 001442 | | | | | | | | | | | | |
| 1.0e6 OT- | 100 | — | — | — | — | — | — | — | — | — | — | 100 |
| 001617 | | | | | | | | | | | | |
| 1.0e6 OT- | 100 | — | — | — | — | — | — | — | — | 87.5 | — | 87.5 |
| 001407 (higher | | | | | | | | | | | | |
| cell dose) | | | | | | | | | | | | |
| pELDS (higher | 100 | 75 | 62.5 | 37.5 | 0 | — | — | — | — | — | — | — |
| cell dose) | | | | | | | | | | | | |

[0770] Animals were bled once a week and plasma and T cells were analyzed. OT-001617 led to the expansion of CAR positive T cells in the blood of the mice at days 27 and 34 which was accompanied by an increase in IL12 and IFN gamma levels. OT-001356 resulted in consistent CAR positive T cell expansion at all time points measured namely 13, 20, 27 and 34 days and was accompanied by an increase in IL12 levels. Granzyme B levels were also elevated at most timepoints in all IL12 positive groups. Plasma IL12 also correlated with CAR-T cell numbers, plasma interferon gamma and granzyme B expression.

### Example 13. In Vivo Pharmacokinetics of IL12-ecDHFR Expression after Exposure to Trimethoprim

[0771] To evaluate the pharmacokinetics of IL12 production, NSG mice were infused with human T cells transduced with OT-001622. On day 0 (48 hours after T cell infusion), mice were bled to establish a baseline level of IL12 (pre TMP dosing) in the plasma and were then administered 500 m/kg TID (three times a day at 2, 4, 8 hours). Several blood draws were taken over 24 hours for MSD analysis of IL12 in plasma. At 2, 6, 10, and 24 hours post first the initial TMP dose, there was a 50-fold, 25-fold, 20-fold, and 4-fold increase over baseline in plasma levels of IL12 (Table 24). This fold change in plasma IL12 levels was not seen in mice treated with vehicle alone.

TABLE 24
Plasma IL12 levels in NSG mice

| Time | | | | | | | | |
|---|---|---|---|---|---|---|---|---|
| After | | | | | | | | |
| (hours) | | | | | | | | |
| First | Plasma IL12p70 (pg/mL) | | | | | | | |
| Dose | Vehicle | | | | 500 mg/kg Trimethoprim | | | |
| 0 | 0.00 | 0.00 | 1.49 | 0.00 | 0.00 | 0.00 | 0.00 | 0.00 |
| 2 | 1.45 | 1.42 | 1.38 | 0.00 | 81.57 | 65.56 | 62.34 | 70.24 |
| 6 | 3.96 | 1.56 | 1.42 | 1.38 | 56.18 | 49.70 | 49.33 | 54.44 |
| 10 | 3.09 | 0.00 | 1.73 | 0.00 | 56.47 | 53.64 | 46.89 | 47.50 |
| 24 | 1.94 | 1.52 | 1.76 | 0.00 | 6.02 | 13.85 | 4.59 | 4.83 |

### Example 14. In Vivo Regulation of ecDHFR-Regulated IL12 After Exposure to TMP

[0772] The study was designed to evaluate how pulsatile dosing of Trimethoprim (TMP) induces expression of ecDHFR-regulated IL12 by T cells transduced with OT-001617. To test this in vivo and to evaluate the effect of regulated IL12 production on in vivo anti-tumor activity, experiments were performed in NSG mice. Nalm6 cells were transfected with Redifect Red-Fluc-GFP (Perkin Elmer) under selection using puromycin for to generate a line that stably expresses the luciferase reporter; thereafter named Nalm6-Luc. Ten days before tumor implantation, Nalm6-Luc cells were thawed and cultured in puromycin-containing media. On day 0, cells were counted, resuspended in PBS and 1e6 cells were injected into NSG mice via tail vein. On day 6, mice were imaged for bioluminescent intensity (BLI) and sorted into groups based on their tumor size ensure that all groups had the same sized tumors. T cells activated with CD3/CD28 Dynabeads, transduced with lentiviral vectors carrying the constructs shown in Table 25, and expanded for 10 days. On day 7, T cells were thawed and transferred into the mice. Eight days following T cell transfer, animals were orally dosed once a day for 6 days with the indicated levels of TMP.

[0773] In vitro all constructs utilized in the study showed greater than 5% CAR positive CD3/CD45 double positive T cells, when co-cultured with K562 cells (parental or CD19 expressing). Ligand dependent IL12 expression was observed with OT-001617 expressing T cells treated with 50 μM TMP, whereas OT-001356 constitutively expressed IL12. Tumor bearing mice were infused with modified T cells and then treated with TMP (Q.D. i.e. once a day dosing) on days 15, 16, 17, 18, 19 and 20. The dose groups are shown in Table 25 and the total flux values are shown in Table 26.

TABLE 25
Dose groups of mice infused with T cells

| | CAR T | | |
|---|---|---|---|
| | Cells | Vector | TMP dose |
| Group | (×l0⁶) | (Name) | (mg/kg) |
| 1 | 0 | Empty Vector | 0 |
| 2 | 1 | OT-001407 | 0 (vehicle) |
| 3 | 1 | OT-001407 | 500 |
| 4 | 1 | OT-001356 | 0 (vehicle) |
| 5 | 1 | OT-001356 | 500 |
| 6 | 1 | OT-001617 | 500 |
| 7 | 1 | OT-001617 | 150 |
| 8 | 1 | OT-001617 | 50 |
| 9 | 1 | OT-001617 | 0 (vehicle) |

TABLE 26
Total Flux in tumor bearing mice

| | | OT-001407 | | OT-001356 | | OT-001617 | | | |
|---|---|---|---|---|---|---|---|---|---|
| | Empty | 500 | | 500 | | 500 | 150 | 50 | |
| | (pELDS) | mg/kg | | mg/kg | | mg/kg | mg/kg | mg/kg | |
| Days | Vector | TMP | Vehicle | TMP | Vehicle | TMP | TMP | TMP | Vehicle |
| 6 | 5.4E+06 | 5.3E+06 | 5.3E+06 | 5.3E+06 | 5.2E+06 | 4.0E+06 | 4.0E+06 | 4.0E+06 | 4.1E+06 |
| 14 | 4.8E+08 | 4.9E+06 | 1.4E+07 | 5.7E+06 | 3.9E+06 | 1.2E+06 | 1.1E+06 | 1.8E+06 | 1.3E+06 |
| 21 | 6.4E+09 | 9.4E+06 | 6.3E+07 | 8.8E+05 | 1.0E+06 | 9.1E+05 | 8.7E+05 | 1.0E+06 | 9.3E+05 |

[0774] As shown in Table 26, co-expression of IL12 increases CD19 CAR mediated anti-tumor activity in vivo. The basal level of IL12 expressed in the context of the CD19 CAR-IRES-IL12-ecDHFR transduced T cells was sufficient to control tumor burden in mice treated with vehicle alone.

[0775] 24 hours following the final TMP dose, the number of CAR-T cells per 504 blood was analyzed by flow cytometry (mouse CD45-neg, human CD45+, human CD3+, CD19-Fc+). The number of CAR-T cells in 504 are shown in Table 27 with average values in bold.

TABLE 27
CAR-T cells in the blood

| | OT-001407 | | OT-001356 | | OT-001617 | | | |
|---|---|---|---|---|---|---|---|---|
| Naïve | | 500 | | 500 | 500 | 150 | 50 | |
| (No | | mg/kg | | mg/kg | mg/kg | mg/kg | mg/kg | |
| Tumor) | Vehicle | TMP | Vehicle | TMP | TMP | TMP | TMP | Vehicle |
| 3.42 | 27.35 | 6.84 | 52603.42 | 57181.20 | 605.13 | 203.42 | 95.73 | 68.38 |
| 1.71 | 63.25 | 44.44 | 45603.42 | 53601.71 | 611.97 | 345.30 | 160.68 | 64.96 |
| 1.71 | 32.48 | 3.42 | 33135.04 | 67005.13 | 336.75 | 85.47 | 78.63 | 71.79 |
| 0.00 | 25.64 | 42.74 | 53818.80 | 63287.18 | 326.50 | 153.85 | 157.26 | 131.62 |
| — | — | — | — | — | 526.50 | 208.55 | 47.86 | 23.93 |
| — | — | — | — | — | 210.26 | 427.35 | 100.85 | 20.51 |
| — | — | — | — | — | 642.74 | 832.48 | 49.57 | 23.93 |
| — | — | — | — | — | 423.93 | 389.74 | 78.63 | 247.86 |
| 1.71 | 37.18 | 24.36 | 46290.17 | 60268.80 | 470.09 | 197.01 | 123.08 | 84.19 |

[0776] As shown in Table 27, TMP dependent increase in T cell numbers was observed with OT-001617, whereas positive control OT-001356 showed ligand independent expansion of T cells and the negative control OT-001407 did not show any T cell expansion.

[0777] Blood samples were also collected prior to, as well as 6 and 24 hours post each dose and analyzed for IL12 levels. Pulsatile expression of IL12 was observed with TMP treatment as shown in Table 28 with peak plasma levels being achieved at 6 hours following first dose.

TABLE 28
IL12 expression in blood

| Time | | | OT- | | OT- | OT- | OT- | OT- | |
|---|---|---|---|---|---|---|---|---|---|
| After | | | 001407 | | 001356 | 001617 | 001617 | 001617 | |
| First | | OT- | 500 | OT- | 500 | 500 | 150 | 50 | OT- |
| Dose | Empty | 001407 | mg/kg | 001356 | mg/kg | mg/kg | mg/kg | mg/kg | 001617 |
| (h) | Vector | Vehicle | TMP | Vehicle | TMP | TMP | TMP | TMP | Vehicle |
| 0 | 0.06 | 0.00 | 0.00 | 1486.49 | 1561.62 | 0.44 | 0.49 | 0.44 | 0.51 |
| 6 | 0.25 | 0.00 | 0.00 | 1327.64 | 1286.87 | 15.23 | 12.91 | 9.03 | 0.50 |
| 24 | 0.46 | 0.00 | 0.00 | 878.70 | 899.92 | 0.79 | 0.57 | 0.47 | 0.53 |
| 144 | 1.00 | 0.09 | 0.00 | 232.84 | 356.07 | 1.04 | 0.86 | 0.91 | 2.14 |
| 150 | 1.30 | 0.68 | 0.00 | 230.88 | 314.10 | 7.72 | 4.41 | 3.46 | 2.21 |
| 168 | 0.97 | 0.12 | 0.07 | 300.24 | 377.69 | 1.21 | 1.01 | 0.86 | 1.63 |

### Example 15. Effect of IRES on IL12 Expression

[0778] Human T cells were activated with CD3/CD28 Dynabeads (Life Technologies) for 1 day prior to transduction with lentivirus carrying the transgene related to constructs OT-001405 or OT-001406. Seven days after the transduction, cells were treated with 1 μM Shield-1 for 24 hours or vehicle control. Flexi IL12 was quantified by MSD assay for IL12p70. Constitutive IL12 expression was observed under the control of PGK promoter for OT-001406. Bicistronic construct with CD19 and IL12 (or IL12 FKBP-DD) separated by internal ribosome entry sequence (IRES) OT-001405 showed low basal expression in the absence of ligand and approximately 5-10 pg/ml IL12 levels in the presence of shield 1.

[0779] All publications, patent applications, patents, and other references mentioned herein are incorporated by reference in their entirety. In case of conflict, the present specification, including definitions, will control. In addition, section headings, the materials, methods, and examples are illustrative only and not intended to be limiting.

1. A modified cell comprising:
(a) a first recombinant protein comprising an effector module, said effector module comprising:
(i) a stimulus response element (SRE) linked to at least one recombinant protein selected from: a cytokine, a cytokine-cytokine receptor fusion protein, and a CD19 chimeric antigen receptor (CD19 CAR); and
(ii) the SRE comprises a DD, wherein said DD is derived from a parent protein or a mutant protein having one or more amino acid mutations in the amino acid sequence of the DD compared to said parent protein, wherein the parent protein is selected from the group consisting of:
(i) human DHFR (hDHFR) (SEQ ID NO: 1);
(ii} E. coli DHFR (ecDHFR) (SEQ ID NO: 2); and
(iii) human protein FKBP (SEQ ID NOs: 3 or 1087); and
(b) optionally, a second recombinant protein comprising a CD19 chimeric antigen receptor (CAR).

2. The cell of claim 1, wherein the cytokine comprises IL12, IL15, or combinations thereof.

3. The cell of claim 2, wherein the IL12 is a fusion protein comprising a p40 subunit, a linker, and a p35 subunit.

4. The cell of claim 3, wherein said p40 subunit is a p40 (23-328 of WT) (SEQ ID NO: 563), a p40 (WT) (SEQ ID NO:1091) or a p40 (23-328 of WT) (K217N) (SEQ ID NO: 578).

5. The cell of claim 4, wherein said p40 subunit is p40 (23-328 of WT) (SEQ ID NO: 563).

6. The cell of claim 3, wherein the p35 subunit is a p35 (57-253 of WT) (SEQ ID NO: 564) or p35 (WT) (SEQ ID NO: 1093).

7. The cell of claim 6, wherein the p35 subunit is a p35 (57-253 of WT) (SEQ ID NO: 564).

8. The cell of claim 1, wherein the cytokine-cytokine receptor fusion polypeptide comprises the whole or a portion of SEQ. ID NOs: 616, 632 fused to the whole or a portion of any of SEQ. ID NOs: 632; 855, or 1097 to produce a IL15-1L15 receptor fusion polypeptide.

9. The cell of claim 1, wherein the parent protein is a human DHFR (hDHFR), and the DD comprises one or more mutations selected from the group consisting of: Mdel1, I17A, I17V, Q36F, Q36K, N65F, Y122I, N127Y, and A125F.

10. The cell of claim 1, wherein the parent protein is a human DHFR (hDHFR), and the DD comprises one or more mutations selected from:
a single mutation selected from the group consisting of: Mdel1, I17A, I17V, Q36F, Q36K, N65F, Y122I, and A125F;
a double mutation selected from the group consisting of: (M1del, I17A), (M1del, I17V), and (M1del, Y122I);
a triple mutation selected from the group consisting of: (M1del, Y122I, A125F), (M1del, Q36K, Y122I), (M1del, I17V, Y122I), and (M1del, I17A, Y122I); and
a quadruple or higher mutation selected from the group consisting of: (M1del, Q36F, N65F, Y122I).

11. The cell of claim 10, wherein the DD comprises an hDHFR mutant protein having three mutations (M1del, Y122I, N127Y).

12. The cell of claim 10, wherein the DD comprises an hDHFR mutant protein having three mutations (M1del, I17V, Y122I).

13. The cell of claim 10, wherein the DD comprises an hDHFR mutant protein having two mutations (M1del, I17V).

14. The cell of claim 1, wherein the CD19 CAR is linked to the effector module.

15. The cell of claim 1, wherein the CD19 CAR is not linked to the effector module.

16. The cell of claim 1, wherein the CD19 CAR comprises:
(a) a CD19 binding moiety;
(b) a transmembrane domain;
(c) an intracellular signaling domain; and
(d) optionally, one or more co-stimulatory domains.

17. The cell of claim 16, wherein the CD19 binding moiety is selected from:
(a) a single chain variable fragment (scFv),
(b) an Ig NAR,
(c) a Fab fragment,
(d) a Fab′ fragment,
(e) a F(ab)′2 fragment,
(f) a F(ab)′3 fragment,
(g) an Fv,
(h) a bis-scFv, a (scFv)2,
(i) a minibody,
(j) a diabody,
(k) a triabody,
(l) a tetrabody,
(m) an intrabody,
(n) a disulfide stabilized Fv protein (dsFv),
(o) a unibody,
(p) a nanobody, and
(q) an antigen binding region derived from any one of (a) to (p) that binds to CD19.

18. The cell of claim 17, wherein the CD19 binding moiety is a scFv that specifically binds a CD19 antigen.

19. The cell of claim 18, wherein the scFv is a CD19 scFv comprising an amino acid sequence of SEQ ID NO: 465.

20. The cell of claim 1, wherein the cytokine, cytokine-cytokine receptor fusion protein or CAR component is further linked to at least one of:
(a) a leader sequence;
(b) a signal peptide:
(c) a linker;
(d) a spacer;
(e) a cleavage site;
(f) a tag;
(g) a co-stimulatory domain;
(h) a fluorescence protein; and
(i) a hinge.

21. The cell of claim 16, wherein the intracellular signaling domain of the CD19 CAR is the signaling domain derived from T cell receptor CD3zeta or a cell surface molecule selected from the group consisting of FcR gamma, FcR beta, CD3 gamma, CD3 delta, CD3 epsilon, CD5, CD22, CD79a, CD79b, and CD66d; and the co-stimulatory domain is present and is selected from the group consisting of 4-1BB (CD137), 2B4, HVEM, ICOS, LAG3, DAP10, DAP12, CD27, CD28, OX40 (CD134), CD30, CD40, ICOS (CD278), glucocorticoid-induced tumor necrosis factor receptor (GITR), lymphocyte function-associated antigen-1 (LFA-1), CD2, CD7, LIGHT, NKG2C, and B7-H3.

22. The cell of claim 21, wherein the intracellular signaling domain of the CD19 CAR comprises a T-cell receptor CD3zeta signaling domain comprising the amino acid sequence of SEQ ID NO: 299.

23. The cell of claim 22, wherein the intracellular signaling domain of the CD19 CAR is a T-cell receptor CD3zeta signaling domain comprising the amino acid sequence of SEQ ID NO: 467 and when the co-stimulatory domain is present, the co-stimulatory domain has an amino acid sequence selected from SEQ ID NOs: 233, 228-232, and 234-334.

24. The cell of claim 16, wherein the transmembrane domain is derived from any of the members of the group consisting of:
(a) a molecule selected from the group consisting of CD8α, CD4, CD5, CD8, CD8α, CD9, CD16, CD22, CD33, CD28, CD37, CD45, CD64, CD80, CD86, CD148, DAP 10, EpoRI, GITR, LAG3, ICOS, Her2, OX40 (CD134), 4-1BB (CD137), CD152, CD154, PD-1, or CTLA-4
(b) a transmembrane region of an alpha, beta or zeta chain of a T-cell receptor;
(c) the CD3 epsilon chain of a T-cell receptor; and
(d) an immunoglobulin selected from IgG1, IgD, IgG4, and an IgG4 Fc region.

25. The cell of claim 24, wherein the transmembrane domain comprises an amino acid sequence selected from the group consisting of SEQ ID NOs: 369, 335-368, 370-385 and 697-707.

26. The cell of claim 16, wherein the CAR further comprises a hinge region near the transmembrane domain, said hinge region comprising an amino acid sequence selected from the group consisting of SEQ ID NOs: 400, 386-399, and 401-464.

27. The cell of claim 1, wherein the SRE is responsive to or interacts with at least one stimulus.

28. The cell of claim 27, wherein the stimulus is Trimethoprim (TMP) or Methotrexate (MTX).

29. The cell of claim 1, wherein
(a) the effector module is selected from the group consisting of SEQ ID NOs: 1121, 1123, 1129, 1131, 1133, 1135, 1137, 1139, and 1141; and
(b) the CD19 CAR is selected from the group consisting of SEQ ID NOs: 1120, 1122, 1128, 1130, 1132, 1134, 1136, 1138, and 1140.

30. The cell of claim 1, comprising at least one recombinant protein comprising an amino acid sequence selected from the group consisting of SEQ ID NOs: 1127, 1125, 1126, 1082, 1118, 1119, 1124, and 1127.

31. The cell of claim 1, wherein the cell is a T-cell.

32.-48. (canceled)

The application's sequence listing, which the Patent Office published only in electronic form, follows.

SEQUENCE LISTING (1236 sequences)

SEQ ID NO: 1 - protein, 159 aa, Escherichia coli [sequence omitted]

SEQ ID NO: 2 - protein, 187 aa, Homo sapiens
MVGSLNCIVAVSQNMGIGKNGDLPWPPLRNEFRYFQRMTTTSSVEGKQNLVIMGKKTWFSIPEKNRPLKGRINLVLSRELKEPPQGAHFLSRSLDDALKLTEQPELANKVDMVWIVGGSSVYKEAMNHPGHLKLFVTRIMQDFESDTFFPEIDLEKYKLLPEYPGVLSDVQEEKGIKYKFEVYEKND

SEQ ID NO: 3 - protein, 107 aa, Homo sapiens
GVQVETISPGDGRTFPKRGQTCVVHYTGMLEDGKKFDSSRDRNKPFKFMLGKQEVIRGWEEGVAQMSVGQRAKLTISPDYAYGATGHPGIIPPHATLVFDVELLKLE

SEQ ID NO: 4 - protein, 158 aa, Artificial Sequence
  Description of Artificial Sequence: Synthetic Destabilizing Domain (DD)
ISLIAALAVDYVIGMENAMPWNLPADLAWFKRNTLNKPVIMGRHTWESIGRPLPGRKNIILSSQPGTDDRVTWVKSVDEAIAACGDVPEIMVIGGGRVIEQFLPKAQKLYLTHIDAEVEGDTHFPDYEPDDWESVFSEFHDADAQNSHSYCFEILERR

SEQ ID NO: 5 - protein, 158 aa, Artificial Sequence
  Description of Artificial Sequence: Synthetic Destabilizing Domain (DD)
ISLIAALAVDHVIGMENAMPWNLPADLAWFKRNTLNKPVIMGRHTWESIGRPLPGRKNIILSSQPGTDDRVTWVKSVDEAIAACGDVPEIMVIGGGRVYEQFLPKAQKLYLTHIDAEVEGDTHFPDYKPDDWESVFSEFHDADAQNSHSYCFEILERR

SEQ ID NO: 6 - protein, 107 aa, Artificial Sequence
  Description of Artificial Sequence: Synthetic Destabilizing Domain (DD)
GVQVETISPGDGRTFPKRGQTCVVHYTGMLEDGKKVDSSRDRNKPFKFMLGKQEVIRGWEEGVAQMSVGQRAKLTISPDYAYGATGHPGIIPPHATLVFDVELLKPE

SEQ ID NO: 7 - protein, 107 aa, Artificial Sequence
  Description of Artificial Sequence: Synthetic Destabilizing Domain (DD)
GVQVETISPGDGRTFPKRGQTCVVHYTGMLGDGKKVDSSRDRNKPFKFMLGKQEVIRGWEEGVAQMSVGQGAKLTISPDYAYGATGHPGIIPPHATLVFDVELLELE

SEQ ID NO: 8 - protein, 186 aa, Artificial Sequence
  Description of Artificial Sequence: Synthetic Destabilizing Domain (DD)
VGSLNCIVAVSQNMGIGKNGDLPWPPLRNEFRYFFRMTTTSSVEGKQNLVIMGKKTWFSIPEKNRPLKGRINLVLSRELKEPPQGAHFLSRSLDDALKLTEQPELANKVDMVWIVGGSSVIKEFMNHPGHLKLFVTRIMQDFESDTFFPEIDLEKYKLLPEYPGVLSDVQEEKGIKYKFEVYEKND

SEQ ID NO: 9 - protein, 449 aa, Artificial Sequence
  Description of Artificial Sequence: Synthetic heavy chain variable domain
EVKLQESGPGLVAPSQSLSVTCTVSGVSLPDYGVSWIRQPPRKGLEWLGVIWGSETTYYNSALKSRLTIIKDNSKSQVFLKMNSLQTDDTAIYYCAKHYYYGGSYAMDYWGQGTSVTVSSASTKGPSVFPLAPSSKSTSGGTAALGCLVKDYFPEPVTVSWNSGALTSGVHTFPAVLQSSGLYSLSSVVTVPSSSLGTQTYICNVNHKPSNTKVDKKVEPKSCDKTHTCPPCPAPPVAGPSVFLFPPKPKDTLMISRTPEVTCVVVDVSHEDPEVKFNWYVDGVEVHNAKTKPREEQYNSTYRVVSVLTVLHQDWLNGKEYKCKVSNKGLPSSIEKTISKAKGQPREPQVYTLPPSRDELTKNQVSLTCLVKGFYPSDIAVEWESNGQPENNYKTTPPVLDSDGSFFLYSKLTVDKSRWQQGNVFSCSVMHEALHNHYTQKSLSLSPGK

SEQ ID NO: 10 - protein, 223 aa, Artificial Sequence
  Description of Artificial Sequence: Synthetic heavy chain variable domain
EVKLQESGPGLVAPSQSLSVTCTVSGVSLPDYGVSWIRQPPRKGLEWLGVIWGSETTYYNSALKSRLTIIKDNSKSQVFLKMNSLQTDDTAIYYCAKHYYYGGSYAMDYWGQGTSVTVSSASTKGPSVFPLAPSSKSTSGGTAALGCLVKDYFPEPVTVSWNSGALTSGVHTFPAVLQSSGLYSLSSVVTVPSSSLGTQTYICNVNHKPSNTKVDKKVEPKSC

SEQ ID NO: 11 - protein, 234 aa, Artificial Sequence
  Description of Artificial Sequence: Synthetic heavy chain variable domain
EVKLQESGPGLVAPSQSLSVTCTVSGVSLPDYGVSWIRQPPRKGLEWLGVIWGSETTYYNSALKSRLTIIKDNSKSQVFLKMNSLQTDDTAIYYCAKHYYYGGSYAMDYWGQGTSVTVSSASTKGPSVFPLAPSSNYHLENEVARLKKLSGGTAALGCLVKDYFPEPVTVSWNSGALTSGVHTFPAVLQSSGLYSLSSVVTVPSSSLGTQTYICNVNHKPSNTKVDKKVEPKSC

SEQ ID NO: 12 - protein, 460 aa, Artificial Sequence
  Description of Artificial Sequence: Synthetic heavy chain variable domain
EVKLQESGPGLVAPSQSLSVTCTVSGVSLPDYGVSWIRQPPRKGLEWLGVIWGSETTYYNSALKSRLTIIKDNSKSQVFLKMNSLQTDDTAIYYCAKHYYYGGSYAMDYWGQGTSVTVSSASTKGPSVFPLAPSSNYHLENEVARLKKLSGGTAALGCLVKDYFPEPVTVSWNSGALTSGVHTFPAVLQSSGLYSLSSVVTVPSSSLGTQTYICNVNHKPSNTKVDKKVEPKSCDKTHTCPPCPAPPVAGPSVFLFPPKPKDTLMISRTPEVTCVVVDVSHEDPEVKFNWYVDGVEVHNAKTKPREEQYNSTYRVVSVLTVLHQDWLNGKEYKCKVSNKGLPSSIEKTISKAKGQPREPQVYTLPPSRDELTKNQVSLTCLVKGFYPSDIAVEWESNGQPENNYKTTPPVLDSDGSFFLYSKLTVDKSRWQQGNVFSCSVMHEALHNHYTQKSLSLSPGK

SEQ ID NO: 13 - protein, 241 aa, Artificial Sequence
  Description of Artificial Sequence: Synthetic heavy chain variable domain
EVKLQESGPGLVAPSQSLSVTCTVSGVSLPDYGVSWIRQPPRKGLEWLGVIWGSETTYYNSALKRLTIIKDNSKSQVFLKMNSLQTDDTAIYYCAKHYYYGGSYAMDYWGQGTSVTVSSASTKGPSVFPLAPSSKSTSGGTAALGCLVKDYFPEPVTVSWNSGALTSGVHTFPAVLQSSGLYSLSSVVTVPSSSLGTQTYICNVNHKPSNTKVDKKVEPKSCGGGGSNYHLENEVARLKKL

SEQ ID NO: 14 - protein, 471 aa, Artificial Sequence
  Description of Artificial Sequence: Synthetic heavy chain variable domain
EVKLQESGPGLVAPSQSLSVTCTVSGVSLPDYGVSWIRQPPRKGLEWLGVIWGSETTYYNSALKSRLTIIKDNSKSQVFLKMNSLQTDDTAIYYCAKHYYYGGSYAMDYWGQGTSVTVSSASTKGPSVFPLAPSSKSTSGGTAALGCLVKDYFPEPVTVSWNSGALTSGVHTFPAVLQSSGLYSLSSVVTVPSSSLGTQTYICNVNHKPSNTKVDKKVEPKSCGGGGSNYHLENEVARLKKLGGSDKTHTCPPCPAPPVAGPSVFLFPPKPKDTLMISRTPEVTCVVVDVSHEDPEVKFNWYVDGVEVHNAKTKPREEQYNSTYRVVSVLTVLHQDWLNGKEYKCKVSNKGLPSSIEKTISKAKGQPREPQVYTLPPSRDELTKNQVSLTCLVKGFYPSDIAVEWESNGQPENNYKTTPPVLDSDGSFFLYSKLTVDKSRWQQGNVFSCSVMHEALHNHYTQKSLSLSPGK

SEQ ID NO: 15 - protein, 120 aa, Artificial Sequence
  Description of Artificial Sequence: Synthetic heavy chain variable domain
EVKLQESGPGLVAPSQSLSVTCTVSGVSLPDYGVSWIRQPPRKGLEWLGVIWGSETTYYNSALKSRLTIIKDNSKSQVFLKMNSLQTDDTAIYYCAKHYYYGGSYAMDYWGQGTSVTVSS

SEQ ID NO: 16 - protein, 111 aa, Artificial Sequence
  Description of Artificial Sequence: Synthetic heavy chain variable domain
DIQLTQSPASLAVSLGQRATISCKASQSVDYDGDSYLNWYQQIPGQPPKLLIYDASNLVSGIPPRFSGSGSGTDFTLNIHPVEKVDAATYHCQQSTEDPWTFGGGTKLEIK

SEQ ID NO: 17 - protein, 464 aa, Artificial Sequence
  Description of Artificial Sequence: Synthetic heavy chain variable domain
MEWSWIFLFLLSGTAGVHSEVQLQQSGPELIKPGASVKMSCKASGYTFTSYVMHWVKQKPGQGLEWIGYINPYNDGTKYNEKFKGKATLTSDKSSSTAYMELSSLTSEDSAVYYCARGTYYYGSRVFDYWGQGTTLTVSSAKTTPPSVYPLAPGSAAQTNSMVTLGCLVKGYFPEPVTVTWNSGSLSSGVHTFPAVLQSDLYTLSSSVTVPSSTWPSETVTCNVAHPASSTKVDKKIVPRDCGCKPCICTVPEVSSVFIFPPKPKDVLTITLTPKVTCVVVDISKDDPEVQFSWFVDDVEVHTAQTQPREEQFNSTFRSVSELPIMHQDWLNGKEFKCRVNSAAFPAPIEKTISKTKGRPKAPQVYTIPPPKEQMAKDKVSLTCMITDFFPEDITVEWQWNGQPAENYKNTQPIMDTDGSYFVYSKLNVQKSNWEAGNTFTCSVLHEGLHNHHTEKSLSHSPGK

SEQ ID NO: 18 - protein, 137 aa, Artificial Sequence
  Description of Artificial Sequence: Synthetic heavy chain variable domain
DIVMTQAAPSIPVTPGESVSISCRSSKSLLNSNGNTYLYWFLQRPGQSPQLLIYRMSNLASGVPDRFSGSGSGTAFTLRISRVEAEDVGVYYCMQHLEYPFTFGAGTKLELKRSDPLINKERGGGGSGGGGSGGGGS

SEQ ID NO: 19 - protein, 124 aa, Artificial Sequence
  Description of Artificial Sequence: Synthetic heavy chain variable domain
QVQLQQSGAEVKKPGSSVKVSCKASGYAFSSYWMNWVRQRPGQGLEWIGQIWPGDGDTNYNGKFKGRATITADESTNTAYMELSSLRSEDTAFYSCARRETTTVGRYYYAMDYWGQGTTVTVSS

SEQ ID NO: 20 - protein, 130 aa, Artificial Sequence
  Description of Artificial Sequence: Synthetic heavy chain variable domain
QITLKESGPTLVKPTQTLTLTCTFSGFSLSTSGVGVGWIRQPPGKALEWLALIYWDDDKRYSPSLKSRLTITKDTSKNQVVLTMTNMDPVDTATYYCAHIDYGSGSYSPRTSYYYYMSVWGKGTTVTVSS

SEQ ID NO: 21 - protein, 125 aa, Artificial Sequence
  Description of Artificial Sequence: Synthetic heavy chain variable domain
QVQLVQSGGGVVQPGRSLRLSCAASGFTFDDYAMHWVRQAPGKGLEWVSGISWNSGSIGYADSVKGRFTISRDNAKNSLYLQMNSLRAEDTAVYYCARDQGYHYYDSAEHAFDIWGQGTVVTVSS

SEQ ID NO: 22 - protein, 125 aa, Artificial Sequence
  Description of Artificial Sequence: Synthetic heavy chain variable domain
EVQLVQSGGGLVQPGRSLRLSCAASGFTFDDYAMHWVRQAPGKGLEWVSGISWNSGSIGYADSVKGRFTISRDNAKNSLYLQMNSLRAEDTAVYYCARDQGYHYYDSAEHAFDIWGQGTVVTVSS

SEQ ID NO: 23 - protein, 228 aa, Artificial Sequence
  Description of Artificial Sequence: Synthetic heavy chain variable domain
EVKLQESGPGLVAPSQSLSVTCTVSGVSLPDYGVSWIRQPPRKGLEWLGVIWGSETTYYNSALKSRLTIIKDNSKSQVFLKMNSLQTDDTAIYYCAKHYYYGGSYAMDYWGQGTSVTVSSASTKGPSVFPLAPSSKSTSGGTAALGCLVKDYFPEPVTVSWNSGALTSGVHTFPAVLQSSGLYSLSSVVTVPSSSLGTQTYICNVNHKPSNTKVDKKVEPKSCDKTHT

SEQ ID NO: 24 - protein, 98 aa, Artificial Sequence
  Description of Artificial Sequence: Synthetic heavy chain variable domain
  MOD_RES (64)..(65): Any amino acid
  MOD_RES (68)..(69): Any amino acid
  MOD_RES (93)..(93): Any amino acid
  MOD_RES (98)..(98): Any amino acid
QVQLVESGGGLVQPGRSLRLSCAASGFTFDDYAMHWVRQAPGKGLEWVSGISWNSGRIGYADSXXGRXXISRDNAKNSLFLQMNSLRAEDTAXYYCAX

SEQ ID NO: 25 - protein, 125 aa, Artificial Sequence
  Description of Artificial Sequence: Synthetic heavy chain variable domain
  MOD_RES (76)..(76): Any amino acid
QVQLVESGGGLVQPGRSLRLSCAASGFTFDDYAMHWVRQAPGKGLEWVSGISWNSGRIGYADSVKGRFTISRDNAXNSLFLQMNSLRAEDTAVYYCARDQGYHYYDSAEHAFDIWGQGTVVTVSS

SEQ ID NO: 26 - protein, 125 aa, Artificial Sequence
  Description of Artificial Sequence: Synthetic heavy chain variable domain
QVQLVESGGGLVQPGRSLRLSCAASGFTFDDYAMHWVRQAPGKGLEWVSGISWNSGRIGYADSVKGRFTISRDNAKNSLFLQMNSLRAEDTAVYYCARDQGYHYYDSAEHAFDIWGQGTVVTVSS

SEQ ID NO: 27 - protein, 125 aa, Artificial Sequence
  Description of Artificial Sequence: Synthetic heavy chain variable domain
EVQLVESGGGLVQPGRSLRLSCAASGFTFDDYAMHWVRQAPGKGLEWVSGISWNSGRIGYADSVKGRFTISRDNAKNSLFLQMNSLRAEDTAVYYCARDQGYHYYDSAEHAFDIWGQGTMVTVSS

SEQ ID NO: 28 - protein, 125 aa, Artificial Sequence
  Description of Artificial Sequence: Synthetic heavy chain variable domain
QVQLVESGGGLVQPGRSLRLSCAASGFTFDDYAMHWVRQAPGKGLEWVSGISWNSGRIGYADSVKGRFTISRDNAKNSLFLQMNSLRAEDTAVYYCARDQGYHYYDSAEHAFDIWGQGTMVTVSS

SEQ ID NO: 29 - protein, 125 aa, Artificial Sequence
  Description of Artificial Sequence: Synthetic heavy chain variable domain
EVQLVESGGGLVQPGRSLRLSCAASGFTFDDYAMHWVRQAPGKGLEWVSGISWNSGRIGYADSVKGRFTISRDNAKNSLFLQMNSLRAEDTAVYYCARDQGYHYYDSAEHAFDIWGQGTVVTVSS

SEQ ID NO: 30 - protein, 125 aa, Artificial Sequence
  Description of Artificial Sequence: Synthetic heavy chain variable domain
EVQLVESGGGLVQPGRSLRLSCAASGFTFDDYAMHWVRLAPGKGLEWVSGISWNSGRIGYADSVKGRFTISRDNAKNSLFLQMNSLRAKDTAVYYCARDQGYHYYDSAEHAFDIWGQGTMVTVSS

SEQ ID NO: 31 - protein, 125 aa, Artificial Sequence
  Description of Artificial Sequence: Synthetic heavy chain variable domain
QMQLVQSGGGLVQPGRSLRLSCAASGFTFDDYAMHWVRQAPGKGLEWVSGISWNSGSIGYADSVKGRFTISRDNAKNSLYLQMNSLRAEDTAVYYCARDQGYHYYDSAEHAFDIWGQGTVVTVSS

SEQ ID NO: 32 - protein, 464 aa, Artificial Sequence; identical to SEQ ID NO: 17
  Description of Artificial Sequence: Synthetic heavy chain variable domain

SEQ ID NO: 33 - protein, 120 aa, Artificial Sequence; identical to SEQ ID NO: 15
  Description of Artificial Sequence: Synthetic heavy chain variable domain

SEQ ID NO: 34 - protein, 218 aa, Artificial Sequence
  Description of Artificial Sequence: Synthetic heavy chain variable domain
EVQLVESGGGLVQPGGSLRLSCAASGVSLPDYGVSWVRQSPGKGLEWVAVIWGSETTYYADSVKGRFTISADTSKNTYLQMNSLRAEDTAWYCSRHYYYGGSYAMDYWGQGTLVTVSSASTKGPSVFPLAPSSKSTSGGTAALGCLVKDYFPEPVTVSWNSGALTSGVHTFPAVLQSSGLYSLSSVVTVPSSSLGTQTYICNVNHKPSNTKVDKKVEP

SEQ ID NO: 35 - protein, 219 aa, Artificial Sequence
  Description of Artificial Sequence: Synthetic heavy chain variable domain
EVQLVESGGGLVQPGGSLRLSCAASGVSLPDYGVSWVRQSPGKGLEWVAVIWGSETTYYADSVKGRFTISADTSKNTYLQMNSLRAEDTAIYYCSRHYYYGGSYAMDYWGQGTLVTVSSASTKGPSVFPLAPSSKSTSGGTAALGCLVKDYFPEPVTVSWNSGALTSGVHTFPAVLQSSGLYSLSSVVTVPSSSLGTQTYICNVNHKPSNTKVDKKVEP

SEQ ID NO: 36 - protein, 460 aa, Artificial Sequence; identical to SEQ ID NO: 12
  Description of Artificial Sequence: Synthetic heavy chain variable domain

SEQ ID NO: 37 - protein, 242 aa, Artificial Sequence
  Description of Artificial Sequence: Synthetic heavy chain variable domain
EVKLQESGPGLVAPSQSLSVTCTVSGVSLPDYGVSWIRQPPRKGLEWLGVIWGSETTYYNSALKSRLTIIKDNSKSQVFLKMNSLQTDDTAIYYCAKHYYYGGSYAMDYWGQGTSVTVSSASTKGPSVFPLAPSSKSTSGGTAALGCLVKDYFPEPVTVSWNSGALTSGVHTFPAVLQSSGLYSLSSVVTVPSSSLGTQTYICNVNHKPSNTKVDKKVEPKSCGGGGSNYHLENEVARLKKL

SEQ ID NO: 38 - protein, 471 aa, Artificial Sequence; identical to SEQ ID NO: 14
  Description of Artificial Sequence: Synthetic heavy chain variable domain

SEQ ID NO: 39 - protein, 118 aa, Artificial Sequence
  Description of Artificial Sequence: Synthetic heavy chain variable domain
EVKLQESGPGLVAPSQSLSVTCTVSGVSLPDYGVSWIRQPPRKGLEWLGVIWGSETTYYNSALKSRLTIIKDNSKSQVFLKMNSLQTDDTAIYYCAKHYYYGGSYAMDYWGQGTSVTV

SEQ ID NO: 40 - protein, 119 aa, Artificial Sequence
  Description of Artificial Sequence: Synthetic heavy chain variable domain
EVQLQQSGPELIKPGASVKMSCKASGYTFTSYVMHWVKQKPGQGLEWIGYINPYNDGTKYNEKFKGKATLTSDKSSSTAYMELSSLTSEDSAVYYCARGTYYYGSRVFDYWGQGTTLTV

SEQ ID NO: 41 - protein, 112 aa, Artificial Sequence
  Description of Artificial Sequence: Synthetic light chain variable domain
DIQLTQSPSSLSASVGDRVTITCKASQSVDYDGDSYLNWYQQIPGKAPKLLIYDASNLVSGIPPRFSGSGSGTDYTFTISSLQPEDIATYHCQQSTEDPWTFGGGTKLQIKR

SEQ ID NO: 42 - protein, 447 aa, Artificial Sequence
  Description of Artificial Sequence: Synthetic light chain variable domain
QVQLVQSGAEVKKPGASVKVSCKASGYTFTSYWMYWVRQATGQGLEWMGRIDPNSGSTKYNEKFKNRFTISRDDSKNTAYLQMNSLKTEDTAVYYCARDYRKGLYAMDYWGQGTTVTVSSASTKGPSVFPLAPCSRSTSESTAALGCLVKDYFPEPVTVSWNSGALTSGVHTFPAVLQSSGLYSLSSVVTVPSSSLGTKTYTCNVDHKPSNTKVDKRVESKYGPPCPPCPAPEFLGGPSVFLFPPKPKDTLMISRTPEVTCVVVDVSQEDPEVQFNWYVDGVEVHNAKTKPREEQFNSTYRVVSVLTVLHQDWLNGKEYKCKVSNKGLPSSIEKTISKAKGQPREPQVYTLPPSQEEMTKNQVSLTCLVKGFYPSDIAVEWESNGQPENNYKTTPPVLDSDGSFFLYSRLTVDKSRWQEGNVFSCSVMHEALHNHYTQKSLSLSLGK

SEQ ID NO: 43 - protein, 111 aa, Artificial Sequence
  Description of Artificial Sequence: Synthetic light chain variable domain
QAVLTQPSSVSGAPGQRVTISCTGSSSNIGAGYDVHWYQQLPGTAPKLLIYGNSNRPSGVPDRFSGSKSGTSASLAVTGLQAEDEADYYCQSYDSSLSDVVFGGGTKLTVL

SEQ ID NO: 44 - protein, 107 aa, Artificial Sequence
  Description of Artificial Sequence: Synthetic light chain variable domain
EIVMTQSPSSLPASVGDRVTITCRASQNIKTYLHWYQQKPGKAPNLLIYAASNLQIGVPSRFSGSGSGTDFTLTISSLQPEDFATYFCQQSYITPPTFGQGTRLEIK

SEQ ID NO: 45 - protein, 214 aa, Artificial Sequence
  Description of Artificial Sequence: Synthetic light chain variable domain
DIQMTQTTSSLSASLGDRVTISCRASQDISKYLNWYQQKPDGTVKLLIYHTSRLHSGVPSRFSGSGSGTDYSLTISNLEQEDIATYFCQQGNTLPYTFGGGTKLEIKRTVAAPSVFIFPPSDEQLKSGTASVVCLLNNFYPREAKVQWKVDNALQSGNSQESVTEQDSKDSTYSLSSTLTLSKADYEKHKVYACEVTHQGLSSPVTKSFNRGEC

SEQ ID NO: 46 - protein, 237 aa, Artificial Sequence
  Description of Artificial Sequence: Synthetic light chain variable domain
DIQMTQTTSSLSASLGDRVTISCRASQDISKYLNWYQQKPDGTVKLLIYHTSRLHSGVPSRFSGSGSGTDYSLTISNLEQEDIATYFCQQGNTLPYTFGGGTKLEIKRTVAAPSVFIFPPSDEQLKSGTASVVCLLNNFYPREAKVQWKVDNALQSGNSQESVTEQDSGGGGSNYHLENEVARLKKLGGGGSDSTYSLSSTLTLSKADYEKHKVYACEVTHQGLSSPVTKSFNRGEC

SEQ ID NO: 47 - protein, 107 aa, Artificial Sequence
  Description of Artificial Sequence: Synthetic light chain variable domain
DIQMTQTTSSLSASLGDRVTISCRASQDISKYLNWYQQKPDGTVKLLIYHTSRLHSGVPSRFSGSGSGTDYSLTISNLEQEDIATYFCQQGNTLPYTFGGGTKLEIT

SEQ ID NO: 48 - protein, 107 aa, Artificial Sequence; identical to SEQ ID NO: 47
  Description of Artificial Sequence: Synthetic light chain variable domain

SEQ ID NO: 49 - protein, 115 aa, Artificial Sequence
  Description of Artificial Sequence: Synthetic light chain variable domain
DIVMTQAAPSIPVTPGESVSISCRSSKSLLNSNGNTYLYWFLQRPGQSPQLLIYRMSNLASGVPDRFSGSGSGTAFTLRISRVEAEDVGVYYCMQHLEYPFTFGAGTKLELKRAD

SEQ ID NO: 50 - protein, 107 aa, Artificial Sequence; identical to SEQ ID NO: 47
  Description of Artificial Sequence: Synthetic light chain variable domain

SEQ ID NO: 51 - protein, 112 aa, Artificial Sequence
  Description of Artificial Sequence: Synthetic light chain variable domain
DIVMTQAAPSIPVTPGESVSISCRSSKSLLNSNGNTYLYWFLQRPGQSPQLLIYRMSNLASGVPDRFSGSGSGTAFTLRISRVEAEDVGVYYCMQHLEYPFTFGAGTKLELK

SEQ ID NO: 52 - protein, 106 aa, Artificial Sequence
  Description of Artificial Sequence: Synthetic light chain variable domain
QSALTQPRSVSGFPGQSVTISCTGTTSDDVSWYQQHPGKAPQLMLYDVSKRPSGVPHRFSGSRSGRAASLIISGLQTEDEADYFCCSYAGRYNSVLFGGGTKLTVL

SEQ ID NO: 53 - protein, 106 aa, Artificial Sequence
  Description of Artificial Sequence: Synthetic light chain variable domain
QSALTQPRSVSGFPGQSVTISCTGTTSDDVSWYQQHPGKAPQLMLYDVSKRPSGVPHRFSGSRSGRAASLIISGLQTEDEADYFCSSYAGRYNSVLFGGGTKLTVL

SEQ ID NO: 54 - protein, 110 aa, Artificial Sequence
  Description of Artificial Sequence: Synthetic light chain variable domain
QSALTQPASVSGSPGQSITIFCTGTSSDVGGYNYVSWYQQLPGTAPKLLIYSNNQRPSGVPDRFSGSKSGTSASLAISGLRSEDEADYYCAAWDDSLSVVFGGGTKLTVL

SEQ ID NO: 55 - protein, 109 aa, Artificial Sequence
  Description of Artificial Sequence: Synthetic light chain variable domain
QSVLTQPPSVSAAPGQEVTISCSGSSSNIGNNYVSWYQQLPGTAPKLLIYDNDKRPSGIPDRFSGSKSGTSATLGITGLQTGDEADYYCGTWDGNLSAVFGGGTKVTVL

SEQ ID NO: 56 - protein, 108 aa, Artificial Sequence
  Description of Artificial Sequence: Synthetic light chain variable domain
SYELTQDPAVSVALGQTVRITCQGDSLRSYYASWYQQKPGQAPVLVIYDKNNRPSGIPDRFSGSSSGNTASLTITGAQAEDEADYYCNSRDSSGNNWVFGGGTKLTVL

SEQ ID NO: 57 - protein, 107 aa, Artificial Sequence
  Description of Artificial Sequence: Synthetic light chain variable domain
AIQLTQSPSFLSASVGDRVTITCRASQGISSYLNWYQQRAGKAPELLIYAASNLQSGVPSRFSGSGSGTDFTLTITSVQPEDFATYFCQQGDAFPLTFGPGTKVTIR

SEQ ID NO: 58 - protein, 109 aa, Artificial Sequence
  Description of Artificial Sequence: Synthetic light chain variable domain
EIVLTQSPATLSLSPGETATLSCRASQSINHYLAWYQQKPGQAPRLLIYDASNRATGIPARFSGSGSGTDFTLTISSLEPEDFATYYCQQSYSHPRMYTFGQGTKLEIK

SEQ ID NO: 59 - protein, 109 aa, Artificial Sequence
  Description of Artificial Sequence: Synthetic light chain variable domain
AIRMTQSPSSLSASVGDRVTVTCQASQDISNYLNWYQQKPGRAPKLLIYDASNVKAGVPSRFSGGGSGTDFTLTISSLQPEDFATYYCQQSYSTPQAYTFGQGTKLDIK

SEQ ID NO: 60 - protein, 111 aa, Artificial Sequence
  Description of Artificial Sequence: Synthetic light chain variable domain
QSVLTQPPSVSAAPGQKVTISCSGSSSNIGNNYVSWYQQLPGTAPKLLIYDNNKRPSGIPDRFSGSKSGTSATLGITGLQTGDEADYYCGTWDSSLNRDWVFGGGTKLTVL

SEQ ID NO: 61 - protein, 109 aa, Artificial Sequence
  Description of Artificial Sequence: Synthetic light chain variable domain
  MOD_RES (5)..(6): Any amino acid
  MOD_RES (8)..(9): Any amino acid
  MOD_RES (93)..(93): Any amino acid
  MOD_RES (104)..(104): Any amino acid
QSVLXXPXXASGSPGQSVTVSCTGTGRDIGAYDYVSWYQQHPGKAPKLLIYGVNKRPSGVPDRFSGSKSDNTASLTVSGLQVEDEADYYCSSXAGRKYVFGTGXKVTVL

SEQ ID NO: 62 - protein, 112 aa, Artificial Sequence
  Description of Artificial Sequence: Synthetic light chain variable domain
  MOD_RES (61)..(61): Any amino acid
QSALTQPASVSGSPGQSITISCTETSSDLGGYNYVSWYQHRPGKAPKLIIYDVTVRPSGVXDRFSGSKSGNTASLTISGLQAEDEADYYCGSYTSSSTLLWVFGGGTKLTVL

SEQ ID NO: 63 - protein, 112 aa, Artificial Sequence
  Description of Artificial Sequence: Synthetic light chain variable domain
QSALTQPASVSGSPGQSITISCTGTSSDLGGYNYVSWYQHRPGKAPKLIIYDVTVRPSGVSDRFSGSKSGNTASLTISGLQAEDEADYYCGSYTSSSTLLWVFGGGTKLTVL

SEQ ID NO: 64 - protein, 110 aa, Artificial Sequence
  Description of Artificial Sequence: Synthetic light chain variable domain
QSALTQPASVSGSPGHSITISCTGTRSDVGGFDYVSWYQHNPGKAPKLIIYDVTKRPSGVSNRFSGAKSGITASLTISGLQAEDEADYYCTSYRPGPTFVFGTGTKLDIK

SEQ ID NO: 65 - protein, 112 aa, Artificial Sequence
  Description of Artificial Sequence: Synthetic light chain variable domain
QSALTQPASVSGSPGQSITISCTGTSSDLGGYNYVSWYQHRPGKAPKLIIYDVTVRPSGVSDRFSGSKSGNTASLTISGLQAEDEADYYCGSYTSSSTLLWVFGGGTKLDIK

SEQ ID NO: 66 - protein, 111 aa, Artificial Sequence
  Description of Artificial Sequence: Synthetic light chain variable domain
QSVLTQPRSLSGSPGQSVTIACTGASTDVGGYNYVSWYQQHPGKAPKLMIYDVNKRPSGVPDRFSGSKSGNTAFLTISGLQAEDEADYYCCSYAGSYTFEVFGGGTKLTVL

SEQ ID NO: 67 - protein, 111 aa, Artificial Sequence
  Description of Artificial Sequence: Synthetic light chain variable domain
QLVLTQPPSVSGSPGQSVTFSCTGASSDVGGYDHVSWYQHHPGKGPKLLIYDVSKRPSGVPDRFSGSKSGNTASLTISGLQAEDEADYYCCSFAGYYTYWLFGGGTKVTVL

SEQ ID NO: 68 - protein, 106 aa, Artificial Sequence
  Description of Artificial Sequence: Synthetic light chain variable domain
QSALTQPRSVSGFPGQSVTISCTGTTSDDVSWYQQHPGKAPQLMLYDVSKRPSGVPHRFSGSRSGRAASLIISGLQTEDEADYFCCSYAGRYNSVPFGGGTKLTVL

SEQ ID NO: 69 - protein, 99 aa, Artificial Sequence
  Description of Artificial Sequence: Synthetic light chain variable domain
SYVLTQPPSASGTPGQRVTISCSGSSSNIGSNTVNWYQQFPGTAPKLLIYSNNQRPSGVPDRFSGSKSGTSASLAISGLQSEDEAEYYCAAWDDSLNVV

SEQ ID NO: 70 - protein, 110 aa, Artificial Sequence
  Description of Artificial Sequence: Synthetic light chain variable domain
QSVLTQPPSVSAAPGQKVTISCSGSSSNIGNNYVSWYQQLPGTAPKLLIYDNNKRPSGIPDRFSGSKSGTSATLGITGLQTGDEGDYYCGTWDISLRFGVFGGGTKVTVL

SEQ ID NO: 71 - protein, 111 aa, Artificial Sequence
  Description of Artificial Sequence: Synthetic light chain variable domain
QSVLTQPRSVSGSPGQSVTISCTGPISGVGDYTSVSWYQHYPGKTPKLIIYDVTQRPSGVPNRFSGSKSGNTASLTISGLQADDEADYYCCSYEAPTHTYVFGTGTKLTVL

SEQ ID NO: 72 - protein, 124 aa, Artificial Sequence
  Description of Artificial Sequence: Synthetic light chain variable domain
QVQLQQSGAELVRPGSSVKISCKASGYAFSSYWMNWVKQRPGQGLEWIGQIWPGDGDTNYNGKFKGKATLTADESSSTAYMQLSSLASEDSAVYFCARRETTTVGRYYYAMDYWGQGTTVTVSS

SEQ ID NO: 73 - protein, 239 aa, Artificial Sequence
  Description of Artificial Sequence: Synthetic light chain variable domain
MRCLAEFLGLLVLWIPGAIGDIVMTQAAPSIPVTPGESVSISCRSSKSLLNSNGNTYLYWFLQRPGQSPQLLIYRMSNLASGVPDRFSGSGSGTAFTLRISRVEAEDVGVYYCMQHLEYPFTFGAGTKLELKRADAAPTVSIFPPSSEQLTSGGASVVCFLNNFYPKDINVKWKIDGSERQNGVLNSWTDQDSKDSTYSMSSTLTLTKDEYERHNSYTCEATHKTSTSPIVKSFNRNEC

SEQ ID NO: 74 - protein, 111 aa, Artificial Sequence
  Description of Artificial Sequence: Synthetic light chain variable domain
QAVLTQPRSVSGSPGQSVTISCTGISSGVDSHRYVSWYQHHPGKAPKLMIYDFSKRPSGVPDRFSGSKSGNTASLTISGLQAEDEADYYCSSYAAISPNYVFGTGTKLTVL

SEQ ID NO: 75 - protein, 110 aa, Artificial Sequence
  Description of Artificial Sequence: Synthetic light chain variable domain
QSALTQPASVSGSPGHSITISCTGTRSDVGGFDYVSWYQHNPGKAPKLIIYDVTKRPSGVSNRFSGAKSGITASLTISGLQAEDEADYYCTSYRPGPTFVFGTGTKLTVL

SEQ ID NO: 76 - protein, 111 aa, Artificial Sequence
  Description of Artificial Sequence: Synthetic light chain variable domain
QSALTQPASVSGSPGQSITISCTGTSSDVGAYNFVSWYQQLPGTAPKFLIYDNNKRPPGIPDRFSGSKSGTSATLGITGLQTGDEADYYCATWDSGLSAVVFGGGTKLTVL

SEQ ID NO: 77 - protein, 109 aa, Artificial Sequence
  Description of Artificial Sequence: Synthetic light chain variable domain
AIRMTQSPSSLSASVGDRVTVTCQASQDISNYLNWYQQKPGRAPKLLIYDASNVKAGVPSRFSGGGSGTDFTLTISSLQPEDFATYYCQQSYSTPQAYTFGQGTKLEIK

SEQ ID NO: 78 - protein, 108 aa, Artificial Sequence
  Description of Artificial Sequence: Synthetic light chain variable domain
AIRMTQSPSTLSASVGDRVTITCRASQSISHYLAWYQQKPGKAPKLLIFDASRLASGVPSRFSGSGSGTDFTLTISSLQPEDFATYYCQQSYGAPMFTFGPGTRVDLK

SEQ ID NO: 79 - protein, 107 aa, Artificial Sequence
  Description of Artificial Sequence: Synthetic light chain variable domain
DIQLTQSPSTLSASVGDRVTITCRASQSISRWLAWYQQKPGKAPKLLIYDASNLETGVPSRFSGSGSGTDFTFTISSLQPEDIATYYCQQYDNLPLTFGGGTKVEIK

SEQ ID NO: 80 - protein, 109 aa, Artificial Sequence
  Description of Artificial Sequence: Synthetic light chain variable domain
EIVLTQSPATLSLSPGETATLSCRASQSINHYLAWYQQKPGQAPRLLIYDASNRATGIPARFSGSGSGTDFTLTISSLEPEDFATYYCQQSYSHPRMYTFGQGTKLDIK

SEQ ID NO: 81 - protein, 111 aa, Artificial Sequence
  Description of Artificial Sequence: Synthetic light chain variable domain
QAVLTQPRSVSGSPGQSVTISCTGISSGVDSHRYVSWYQHHPGKAPKLMIYDFSKRPSGVPDRFSGSKSGNTASLTISGLQAEDEADYYCCSYAAISPNYVFGTGTKLTVL

SEQ ID NO: 82 - protein, 121 aa, Artificial Sequence
  Description of Artificial Sequence: Synthetic light chain variable domain
EVQLQQSGPELIKPGASVKMSCKASGYTFTSYVMHWVKQKPGQGLEWIGYINPYNDGTKYNEKFKGKATLTSDKSSSTAYMELSSLTSEDSAVYYCARGTYYYGSRVFDYWGQGTTLTVSS

SEQ ID NO: 83 - protein, 263 aa, Artificial Sequence
  Description of Artificial Sequence: Synthetic single chain variable fragment
WSHPQFEKGGGGSGGGGSDIQMTQTTSSLSASLGDRVTISCRASQDISKYLNWYQQKPDGTVKLLIYHTSRLHSGVPSRFSGSGSGTDYSLTISNLEQEDIATYFCQQGNTLPYTFGGGTKLEITGSTSGSGKPGSGEGSTKGEVKLQESGPGLVAPSQSLSVTCTVSGVSLPDYGVSWIRQPPRKGLEWLGVIWGSETTYYNSALKSRLTIIKDNSKSQVFLKMNSLQTDDTAIYYCAKHYYYGGSYAMDYWGQGTSVTVSS

SEQ ID NO: 84 - protein, 247 aa, Artificial Sequence
  Description of Artificial Sequence: Synthetic single chain variable fragment
DIQMTQTTSSLSASLGDRVTISCRASQDISKYLNWYQQKPDGTVKLLIYHTSRLHSGVPSRFSGSGSGTDYSLTISNLEQEDIATYFCQQGNTLPYTFGGGTKLEITGGSGSGNWSHPQFEKGSGSGEVKLQESGPGLVAPSQSLSVTCTVSGVSLPDYGVSWIRQPPRKGLEWLGVIWGSETTYYNSALKSRLTIIKDNSKSQVFLKMNSLQTDDTAIYYCAKHYYYGGSYAMDYWGQGTSVTVSS

SEQ ID NO: 85 - protein, 242 aa, Artificial Sequence
  Description of Artificial Sequence: Synthetic single chain variable fragment
EIVMTQSPATLSLSPGERATLSCRASQDISKYLNWYQQKPGQAPRLLIYHTSRLHSGIPARFSGSGSGTDYTLTISSLQPEDFAVYFCQQGNTLPYTFGQGTKLEIKGGGGSGGGGSGGGGSQVQLQESGPGLVKPSETLSLTCTVSGVSLPDYGVSWIRQPPGKGLEWIGVIWGSETTYYSSSLKSRVTISKDNSKNQVSLKLSSVTAADTAVYYCAKHYYYGGSYAMDYWGQGTLVTVSS

SEQ ID NO: 86 - protein, 247 aa, Artificial Sequence
  Description of Artificial Sequence: Synthetic single chain variable fragment
QVQLQESGPGLVKPSETLSLTCTVSGVSLPDYGVSWIRQPPGKGLEWIGVIWGSETTYYNSSLKSRVTISKDNSKNQVSLKLSSVTAADTAVYYCAKHYYYGGSYAMDYWGQGTLVTVSSGGGGSGGGGSGGGGSGGGGSEIVMTQSPATLSLSPGERATLSCRASQDISKYLNWYQQKPGQAPRLLIYHTSRLHSGIPARFSGSGSGTDYTLTISSLQPEDFAVYFCQQGNTLPYTFGQGTKLEIK

SEQ ID NO: 87 - protein, 248 aa, Artificial Sequence
  Description of Artificial Sequence: Synthetic single chain variable fragment
EVQLVESGGGLVQPGRSLRLSCAASGFTFDDYAMHWVRQAPGKGLEWVSGISWNSGRIGYADSVKGRFTISRDNAKNSLFLQMNSLRAEDTAVYYCARDQGYHYYDSAEHAFDIWGQGTMVTVSSGGGGSGGGGSGGGGSSYELTQDPAVSVALGQTVRITCQGDSLRSYYASWYQQKPGQAPVLVIYDKNNRPSGIPDRFSGSSSGNTASLTITGAQAEDEADYYCNSRDSSGNNWVFGGGTKLTVL

SEQ ID NO: 88 - protein, 242 aa, Artificial Sequence
  Description of Artificial Sequence: Synthetic single chain variable fragment
EIVMTQSPATLSLSPGERATLSCRASQDISKYLNWYQQKPGQAPRLLIYHTSRLHSGIPARFSGSGSGTDYTLTISSLQPEDFAVYFCQQGNTLPYTFGQGTKLEIKGGGGSGGGGSGGGGSQVQLQESGPGLVKPSETLSLTCTVSGVSLPDYGVSWIRQPPGKGLEWIGVIWGSETTYYNSSLKSRVTISKDNSKNQVSLKLSSVTAADTAVYYCAKHYYYGGSYAMDYWGQGTLVTVSS

SEQ ID NO: 89 - protein, 242 aa, Artificial Sequence
  Description of Artificial Sequence: Synthetic single chain variable fragment
QVQLQESGPGLVKPSETLSLTCTVSGVSLPDYGVSWIRQPPGKGLEWIGVIWGSETTYYNSSLKSRVTISKDNSKNQVSLKLSSVTAADTAVYYCAKHYYYGGSYAMDYWGQGTLVTVSSGGGGSGGGGSGGGGSEIVMTQSPATLSLSPGERATLSCRASQDISKYLNWYQQKPGQAPRLLIYHTSRLHSGIPARFSGSGSGTDYTLTISSLQPEDFAVYFCQQGNTLPYTFGQGTKLEIK

SEQ ID NO: 90 - protein, 242 aa, Artificial Sequence
  Description of Artificial Sequence: Synthetic single chain variable fragment
EIVMTQSPATLSLSPGERATLSCRASQDISKYLNWYQQKPGQAPRLLIYHTSRLHSGIPARFSGSGSGTDYTLTISSLQPEDFAVYFCQQGNTLPYTFGQGTKLEIKGGGGSGGGGSGGGGSQVQLQESGPGLVKPSETLSLTCTVSGVSLPDYGVSWIRQPPGKGLEWIGVIWGSETTYYQSSLKSRVTISKDNSKNQVSLKLSSVTAADTAVYYCAKHYYYGGSYAMDYWGQGTLVTVSS

SEQ ID NO: 91 - protein, 246 aa, Artificial Sequence
  Description of Artificial Sequence: Synthetic single chain variable fragment
EVQLVESGGGLVQPGRSLRLSCAASGFTFDDYAMHWVRQAPGKGLEWVSGISWNSGRIGYADSVKGRFTISRDNAKNSLFLQMNSLRAEDTAVYYCARDQGYHYYDSAEHAFDIWGQGTVVTVSSGGGGSGGGGSGGGGSQSALTQPRSVSGFPGQSVTISCTGTTSDDVSWYQQHPGKAPQLMLYDVSKRPSGVPHRFSGSRSGRAASLIISGLQTEDEADYFCCSYAGRYNSVLFGGGTKLTVL

SEQ ID NO: 92 - protein, 252 aa, Artificial Sequence
  Description of Artificial Sequence: Synthetic single chain variable fragment
QITLKESGPTLVKPTQTLTLTCTFSGFSLSTSGVGVGWIRQPPGKALEWLALIYWDDDKRYSPSLKSRLTITKDTSKNQVVLTMTNMDPVDTATYYCAHIDYGSGSYSPRTSYYYYMSVWGKGTTVTVSSGGGGSGGGGSGGGGSAIQLTQSPSFLSASVGDRVTITCRASQGISSYLNWYQQRAGKAPELLIYAASNLQSGVPSRFSGSGSGTDFTLTITSVQPEDFATYFCQQGDAFPLTFGPGTKVTIR

SEQ ID NO: 93 - protein, 249 aa, Artificial Sequence
  Description of Artificial Sequence: Synthetic single chain variable fragment
QVQLVQSGGGVVQPGRSLRLSCAASGFTFDDYAMHWVRQAPGKGLEWVSGISWNSGSIGYADSVKGRFTISRDNAKNSLYLQMNSLRAEDTAVYYCARDQGYHYYDSAEHAFDIWGQGTVVTVSSGGGGSGGGGSGGGGSEIVLTQSPATLSLSPGETATLSCRASQSINHYLAWYQQKPGQAPRLLIYDASNRATGIPARFSGSGSGTDFTLTISSLEPEDFATYYCQQSYSHPRMYTFGQGTKLEIK

SEQ ID NO: 94 - protein, 249 aa, Artificial Sequence
  Description of Artificial Sequence: Synthetic single chain variable fragment
EVQLVQSGGGLVQPGRSLRLSCAASGFTFDDYAMHWVRQAPGKGLEWVSGISWNSGSIGYADSVKGRFTISRDNAKNSLYLQMNSLRAEDTAVYYCARDQGYHYYDSAEHAFDIWGQGTVVTVSSGGGGSGGGGSGGGGSAIRMTQSPSSLSASVGDRVTVTCQASQDISNYLNWYQQKPGRAPKLLIYDASNVKAGVPSRFSGGGSGTDFTLTISSLQPEDFATYYCQQSYSTPQAYTFGQGTKLDIK

SEQ ID NO: 95 - protein, 251 aa, Artificial Sequence
  Description of Artificial Sequence: Synthetic single chain variable fragment
EVQLVESGGGLVQPGRSLRLSCAASGFTFDDYAMHWVRQAPGKGLEWVSGISWNSGRIGYADSVKGRFTISRDNAKNSLFLQMNSLRAEDTAVYYCARDQGYHYYDSAEHAFDIWGQGTVVTVSSGGGGSGGGGSGGGGSQSVLTQPPSVSAAPGQKVTISCSGSSSNIGNNYVSWYQQLPGTAPKLLIYDNNKRPSGIPDRFSGSKSGTSATLGITGLQTGDEADYYCGTWDSSLNRDWVFGGGTKLTVL

SEQ ID NO: 96 - protein, 252 aa, Artificial Sequence
  Description of Artificial Sequence: Synthetic single chain variable fragment
QVQLVESGGGLVQPGRSLRLSCAASGFTFDDYAMHWVRQAPGKGLEWVSGISWNSGRIGYADSVKGRFTISRDNAKNSLFLQMNSLRAEDTAVYYCARDQGYHYYDSAEHAFDIWGQGTVVTVSSGGGGSGGGGSGGGGSQSALTQPASVSGSPGQSITISCTGTSSDLGGYNYVSWYQHRPGKAPKLIIYDVTVRPSGVSDRFSGSKSGNTASLTISGLQAEDEADYYCGSYTSSSTLLWVFGGGTKLTVL

SEQ ID NO: 97 - protein, 252 aa, Artificial Sequence; identical to SEQ ID NO: 96
  Description of Artificial Sequence: Synthetic single chain variable fragment

SEQ ID NO: 98 - protein, 252 aa, Artificial Sequence
  Description of Artificial Sequence: Synthetic single chain variable fragment
EVQLVESGGGLVQPGRSLRLSCAASGFTFDDYAMHWVRQAPGKGLEWVSGISWNSGRIGYADSVKGRFTISRDNAKNSLFLQMNSLRAEDTAVYYCARDQGYHYYDSAEHAFDIWGQGTVVTVSSGGGGSGGGGSGGGGSQSALTQPASVSGSPGQSITISCTGTSSDLGGYNYVSWYQHRPGKAPKLIIYDVTVRPSGVSDRFSGSKSGNTASLTISGLQAEDEADYYCGSYTSSSTLLWVFGGGTKLTVL

SEQ ID NO: 99 - protein, 252 aa, Artificial Sequence; identical to SEQ ID NO: 98
  Description of Artificial Sequence: Synthetic single chain variable fragment

SEQ ID NO: 100 - protein, 252 aa, Artificial Sequence; identical to SEQ ID NO: 98
  Description of Artificial Sequence: Synthetic single chain variable fragment

SEQ ID NO: 101 - protein, 252 aa, Artificial Sequence
  Description of Artificial Sequence: Synthetic single chain variable fragment
  MOD_RES (76)..(76): Any amino acid
  MOD_RES (201)..(201): Any amino acid
QVQLVESGGGLVQPGRSLRLSCAASGFTFDDYAMHWVRQAPGKGLEWVSGISWNSGRIGYADSVKGRFTISRDNAXNSLFLQMNSLRAEDTAVYYCARDQGYHYYDSAEHAFDIWGQGTVVTVSSGGGGSGGGGSGGGGSQSALTQPASVSGSPGQSITISCTETSSDLGGYNYVSWYQHRPGKAPKLIIYDVTVRPSGVXDRFSGSKSGNTASLTISGLQAEDEADYYCGSYTSSSTLLWVFGGGTKLTVL

SEQ ID NO: 102 - protein, 252 aa, Artificial Sequence; identical to SEQ ID NO: 96
  Description of Artificial Sequence: Synthetic single chain variable fragment

SEQ ID NO: 103 - protein, 250 aa, Artificial Sequence
  Description of Artificial Sequence: Synthetic single chain variable fragment
QVQLVESGGGLVQPGRSLRLSCAASGFTFDDYAMHWVRQAPGKGLEWVSGISWNSGRIGYADSVKGRFTISRDNAKNSLFLQMNSLRAEDTAVYYCARDQGYHYYDSAEHAFDIWGQGTVVTVSSGGGGSGGGGSGGGGSQSALTQPASVSGSPGHSITISCTGTRSDVGGFDYVSWYQHNPGKAPKLIIYDVTKRPSGVSNRFSGAKSGITASLTISGLQAEDEADYYCTSYRPGPTFVFGTGTKLDIK

SEQ ID NO: 104 - protein, 252 aa, Artificial Sequence
  Description of Artificial Sequence: Synthetic single chain variable fragment
QVQLVESGGGLVQPGRSLRLSCAASGFTFDDYAMHWVRQAPGKGLEWVSGISWNSGRIGYADSVKGRFTISRDNAKNSLFLQMNSLRAEDTAVYYCARDQGYHYYDSAEHAFDIWGQGTVVTVSSGGGGSGGGGSGGGGSQSALTQPASVSGSPGQSITISCTGTSSDLGGYNYVSWYQHRPGKAPKLIIYDVTVRPSGVSDRFSGSKSGNTASLTISGLQAEDEADYYCGSYTSSSTLLWVFGGGTKLDIK

SEQ ID NO: 105 - protein, 236 aa, Artificial Sequence
  Description of Artificial Sequence: Synthetic single chain variable fragment
EVQLVESGGGLVQPGRSLRLSCAASGFTFDDYAMHWVRQAPGKGLEWVSGISWNSGRIGYADSVKGRFTISRDNAKNSLFLQMNSLRAEDTAVYYCARDQGYHYYDSAEHAFDIWGQGTMVTVSSQSVLTQPRSLSGSPGQSVTIACTGASTDVGGYNYVSWYQQHPGKAPKLMIYDVNKRPSGVPDRFSGSKSGNTAFLTISGLQAEDEADYYCCSYAGSYTFEVFGGGTKLTVL

SEQ ID NO: 106 - protein, 251 aa, Artificial Sequence
  Description of Artificial Sequence: Synthetic single chain variable fragment
EVQLVESGGGLVQPGRSLRLSCAASGFTFDDYAMHWVRQAPGKGLEWVSGISWNSGRIGYADSVKGRFTISRDNAKNSLFLQMNSLRAEDTAVYYCARDQGYHYYDSAEHAFDIWGQGTMVTVSSGGGGSGGGGSGGGGSQLVLTQPPSVSGSPGQSVTFSCTGASSDVGGYDHVSWYQHHPGKGPKLLIYDVSKRPSGVPDRFSGSKSGNTASLTISGLQAEDEADYYCCSFAGYYTYWLFGGGTKVTVL

SEQ ID NO: 107 - protein, 246 aa, Artificial Sequence
  Description of Artificial Sequence: Synthetic single chain variable fragment
EVQLVESGGGLVQPGRSLRLSCAASGFTFDDYAMHWVRQAPGKGLEWVSGISWNSGRIGYADSVKGRFTISRDNAKNSLFLQMNSLRAEDTAVYYCARDQGYHYYDSAEHAFDIWGQGTVVTVSSGGGGSGGGGSGGGGSQSALTQPRSVSGFPGQSVTISCTGTTSDDVSWYQQHPGKAPQLMLYDVSKRPSGVPHRFSGSRSGRAASLIISGLQTEDEADYFCCSYAGRYNSVPFGGGTKLTVL

SEQ ID NO: 108 - protein, 239 aa, Artificial Sequence
  Description of Artificial Sequence: Synthetic single chain variable fragment
QVQLVESGGGLVQPGRSLRLSCAASGFTFDDYAMHWVRQAPGKGLEWVSGISWNSGRIGYADSVKGRFTISRDNAKNSLFLQMNSLRAEDTAVYYCARDQGYHYYDSAEHAFDIWGQGTMVTVSSGGGGSGGGGSGGGGSSYVLTQPPSASGTPGQRVTISCSGSSSNIGSNTVNWYQQFPGTAPKLLIYSNNQRPSGVPDRFSGSKSGTSASLAISGLQSEDEAEYYCAAWDDSLNVV

SEQ ID NO: 109 - protein, 250 aa, Artificial Sequence
  Description of Artificial Sequence: Synthetic single chain variable fragment
EVQLVESGGGLVQPGRSLRLSCAASGFTFDDYAMHWVRQAPGKGLEWVSGISWNSGRIGYADSVKGRFTISRDNAKNSLFLQMNSLRAEDTAVYYCARDQGYHYYDSAEHAFDIWGQGTVVTVSSGGGGSGGGGSGGGGSQSVLTQPPSVSAAPGQKVTISCSGSSSNIGNNYVSWYQQLPGTAPKLLIYDNNKRPSGIPDRFSGSKSGTSATLGITGLQTGDEGDYYCGTWDISLRFGVFGGGTKVTVL

SEQ ID NO: 110 - protein, 251 aa, Artificial Sequence
  Description of Artificial Sequence: Synthetic single chain variable fragment
EVQLVESGGGLVQPGRSLRLSCAASGFTFDDYAMHWVRLAPGKGLEWVSGISWNSGRIGYADSVKGRFTISRDNAKNSLFLQMNSLRAKDTAVYYCARDQGYHYYDSAEHAFDIWGQGTMVTVSSGGGGSGGGGSGGGGSQSVLTQPRSVSGSPGQSVTISCTGPISGVGDYTSVSWYQHYPGKTPKLIIYDVTQRPSGVPNRFSGSKSGNTASLTISGLQADDEADYYCCSYEAPTHTYVFGTGTKLTVL

SEQ ID NO: 111 - protein, 242 aa, Artificial Sequence
  Description of Artificial Sequence: Synthetic single chain variable fragment
QVQLQESGPGLVKPSETLSLTCTVSGVSLPDYGVSWIRQPPGKGLEWIGVIWGSETTYYSSSLKSRVTISKDNSKNQVSLKLSSVTAADTAVYYCAKHYYYGGSYAMDYWGQGTLVTVSSGGGGSGGGGSGGGGSEIVMTQSPATLSLSPGERATLSCRASQDISKYLNWYQQKPGQAPRLLIYHTSRLHSGIPARFSGSGSGTDYTLTISSLQPEDFAVYFCQQGNTLPYTFGQGTKLEIK

SEQ ID NO: 112 - protein, 242 aa, Artificial Sequence
  Description of Artificial Sequence: Synthetic single chain variable fragment
QVQLQESGPGLVKPSETLSLTCTVSGVSLPDYGVSWIRQPPGKGLEWIGVIWGSETTYYQSSLKSRVTISKDNSKNQVSLKLSSVTAADTAVYYCAKHYYYGGSYAMDYWGQGTLVTVSSGGGGSGGGGSGGGGSEIVMTQSPATLSLSPGERATLSCRASQDISKYLNWYQQKPGQAPRLLIYHTSRLHSGIPARFSGSGSGTDYTLTISSLQPEDFAVYFCQQGNTLPYTFGQGTKLEIK

SEQ ID NO: 113 - protein, 246 aa, Artificial Sequence
  Description of Artificial Sequence: Synthetic single chain variable fragment
EVQLVESGGGLVQPGRSLRLSCAASGFTFDDYAMHWVRQAPGKGLEWVSGISWNSGRIGYADSVKGRFTISRDNAKNSLFLQMNSLRAEDTAVYYCARDQGYHYYDSAEHAFDIWGQGTVVTVSSGGGGSGGGGSGGGGSQSALTQPRSVSGFPGQSVTISCTGTTSDDVSWYQQHPGKAPQLMLYDVSKRPSGVPHRFSGSRSGRAASLIISGLQTEDEADYFCSSYAGRYNSVLFGGGTKLTVL

SEQ ID NO: 114 - protein, 249 aa, Artificial Sequence
  Description of Artificial Sequence: Synthetic single chain variable fragment
EVQLVQSGGGLVQPGRSLRLSCAASGFTFDDYAMHWVRQAPGKGLEWVSGISWNSGSIGYADSVKGRFTISRDNAKNSLYLQMNSLRAEDTAVYYCARDQGYHYYDSAEHAFDIWGQGTVVTVSSGGGGSGGGGSGGGGSEIVLTQSPATLSLSPGETATLSCRASQSINHYLAWYQQKPGQAPRLLIYDASNRATGIPARFSGSGSGTDFTLTISSLEPEDFATYYCQQSYSHPRMYTFGQGTKLDIK

SEQ ID NO: 115 - protein, 249 aa, Artificial Sequence
  Description of Artificial Sequence: Synthetic single chain variable fragment
QMQLVQSGGGLVQPGRSLRLSCAASGFTFDDYAMHWVRQAPGKGLEWVSGISWNSGSIGYADSVKGRFTISRDNAKNSLYLQMNSLRAEDTAVYYCARDQGYHYYDSAEHAFDIWGQGTVVTVSSGGGGSGGGGSGGGGSAIRMTQSPSSLSASVGDRVTVTCQASQDISNYLNWYQQKPGRAPKLLIYDASNVKAGVPSRFSGGGSGTDFTLTISSLQPEDFATYYCQQSYSTPQAYTFGQGTKLEIK

SEQ ID NO: 116 - protein, 252 aa, Artificial Sequence; identical to SEQ ID NO: 98
  Description of Artificial Sequence: Synthetic single chain variable fragment

SEQ ID NO: 117 - protein, 495 aa, Artificial Sequence
  Description of Artificial Sequence: Synthetic single chain variable fragment
METDTLLLWVLLLWVPGSTGEVQLQQSGPELIKPGASVKMSCKASGYTFTSYVMHWVKQKPGQGLEWIGYINPYNDGTKYNEKFKGKATLTSDKSSSTAYMELSSLTSEDSAVYYCARGTYYYGSRVFDYWGQGTTLTVSSGGGGSGGGGSGGGGSDIVMTQAAPSIPVTPGESVSISCRSSKSLLNSNGNTYLYWFLQRPGQSPQLLIYRMSNLASGVPDRFSGSGSGTAFTLRISRVEAEDVGVYYCMQHLEYPFTFGAGTKLELKRSDPTTTPAPRPPTPAPTIASQPLSLRPEACRPAAGGAVHTRGLDFACDIYIWAPLAGTCGVLLLSLVITLYCKRGRKKLLYIFKQPFMRPVQTTQEEDGCSCRFPEEEEGGCELRVKFSRSADAPAYQQGQNQLYNELNLGRREEYDVLDKRRGRDPEMGGKPRRKNPQEGLYNELQKDKMAEAYSEIGMKGERRRGKGHDGLYQGLSTATKDTYDALHMQALPPR

SEQ ID NO: 118 - protein, 247 aa, Artificial Sequence
  Description of Artificial Sequence: Synthetic single chain variable fragment
EIVMTQSPATLSLSPGERATLSCRASQDISKYLNWYQQKPGQAPRLLIYHTSRLHSGIPARFSGSGSGTDYTLTISSLQPEDFAVYFCQQGNTLPYTFGQGTKLEIKGGGGSGGGGSGGGGSGGGGSQVQLQESGPGLVKPSETLSLTCTVSGVSLPDYGVSWIRQPPGKGLEWIGVIWGSETTYYSSSLKSRVTISKDNSKNQVSLKLSSVTAADTAVYYCAKHYYYGGSYAMDYWGQGTLVTVSS

SEQ ID NO: 119 - protein, 251 aa, Artificial Sequence
  Description of Artificial Sequence: Synthetic single chain variable fragment
QVQLVESGGGLVQPGRSLRLSCAASGFTFDDYAMHWVRQAPGKGLEWVSGISWNSGRIGYADSVKGRFTISRDNAKNSLFLQMNSLRAEDTAVYYCARDQGYHYYDSAEHAFDIWGQGTMVTVSSGGGGSGGGGSGGGGSQAVLTQPRSVSGSPGQSVTISCTGISSGVDSHRYVSWYQHHPGKAPKLMIYDFSKRPSGVPDRFSGSKSGNTASLTISGLQAEDEADYYCSSYAAISPNYVFGTGTKLTVL

SEQ ID NO: 120 - protein, 250 aa, Artificial Sequence
  Description of Artificial Sequence: Synthetic single chain variable fragment
QVQLVESGGGLVQPGRSLRLSCAASGFTFDDYAMHWVRQAPGKGLEWVSGISWNSGRIGYADSVKGRFTISRDNAKNSLFLQMNSLRAEDTAVYYCARDQGYHYYDSAEHAFDIWGQGTVVTVSSGGGGSGGGGSGGGGSQSALTQPASVSGSPGHSITISCTGTRSDVGGFDYVSWYQHNPGKAPKLIIYDVTKRPSGVSNRFSGAKSGITASLTISGLQAEDEADYYCTSYRPGPTFVFGTGTKLTVL

SEQ ID NO: 121 - protein, 247 aa, Artificial Sequence
  Description of Artificial Sequence: Synthetic single chain variable fragment
EVQLVQSGGGLVQPGRSLRLSCAASGFTFDDYAMHWVRQAPGKGLEWVSGISWNSGSIGYADSVKGRFTISRDNAKNSLYLQMNSLRAEDTAVYYCARDQGYHYYDSAEHAFDIWGQGTVVTVSSGGGGSGGGGSGGGGSDIQLTQSPSTLSASVGDRVTITCRASQSISRWLAWYQQKPGKAPKLLIYDASNLETGVPSRFSGSGSGTDFTFTISSLQPEDIATYYCQQYDNLPLTFGGGTKVEIK

SEQ ID NO: 122 - protein, 248 aa, Artificial Sequence
  Description of Artificial Sequence: Synthetic single chain variable fragment
QMQLVQSGGGLVQPGRSLRLSCAASGFTFDDYAMHWVRQAPGKGLEWVSGISWNSGSIGYADSVKGRFTISRDNAKNSLYLQMNSLRAEDTAVYYCARDQGYHYYDSAEHAFDIWGQGTVVTVSSGGGGSGGGGSGGGGSAIRMTQSPSTLSASVGDRVTITCRASQSISHYLAWYQQKPGKAPKLLIFDASRLASGVPSRFSGSGSGTDFTLTISSLQPEDFATYYCQQSYGAPMFTFGPGTRVDLK

SEQ ID NO: 123 - protein, 242 aa, Artificial Sequence
  Description of Artificial Sequence: Synthetic single chain variable fragment
DIQMTQTTSSLSASLGDRVTISCRASQDISKYLNWYQQKPDGTVKLLIYHTSRLHSGVPSRFSGSGSGTDYSLTISNLEQEDIATYFCQQGNTLPYTFGGGTKLEITGGGGSGGGGSGGGGSEVKLQESGPGLVAPSQSLSVTCTVSGVSLPDYGVSWIRQPPRKGLEWLGVIWGSETTYYNSALKSRLTIIKDNSKSQVFLKMNSLQTDDTAIYYCAKHYYYGGSYAMDYWGQGTSVTVSS

SEQ ID NO: 124 - protein, 251 aa, Artificial Sequence
  Description of Artificial Sequence: Synthetic single chain variable fragment
EVQLVESGGGLVQPGRSLRLSCAASGFTFDDYAMHWVRQAPGKGLEWVSGISWNSGRIGYADSVKGRFTISRDNAKNSLFLQMNSLRAEDTAVYYCARDQGYHYYDSAEHAFDIWGQGTMVTVSSGGGGSGGGGSGGGGSQSALTQPASVSGSPGQSITISCTGTSSDVGAYNFVSWYQQLPGTAPKFLIYDNNKRPPGIPDRFSGSKSGTSATLGITGLQTGDEADYYCATWDSGLSAVVFGGGTKLTVL

SEQ ID NO: 125 - protein, 247 aa, Artificial Sequence
  Description of Artificial Sequence: Synthetic single chain variable fragment
EIVMTQSPATLSLSPGERATLSCRASQDISKYLNWYQQKPGQAPRLLIYHTSRLHSGIPARFSGSGSGTDYTLTISSLQPEDFAVYFCQQGNTLPYTFGQGTKLEIKGGGGSGGGGSGGGGSGGGGSQVQLQESGPGLVKPSETLSLTCTVSGVSLPDYGVSWIRQPPGKGLEWIGVIWGSETTYYQSSLKSRVTISKDNSKNQVSLKLSSVTAADTAVYYCAKHYYYGGSYAMDYWGQGTLVTVSS

SEQ ID NO: 126 - protein, 250 aa, Artificial Sequence
  Description of Artificial Sequence: Synthetic single chain variable fragment
EVQLVESGGGLVQPGRSLRLSCAASGFTFDDYAMHWVRQAPGKGLEWVSGISWNSGRIGYADSVKGRFTISRDNAKNSLFLQMNSLRAEDTAVYYCARDQGYHYYDSAEHAFDIWGQGTMVTVSSGGGGSGGGGSGGGGSQSALTQPASVSGSPGQSITIFCTGTSSDVGGYNYVSWYQQLPGTAPKLLIYSNNQRPSGVPDRFSGSKSGTSASLAISGLRSEDEADYYCAAWDDSLSVVFGGGTKLTVL

SEQ ID NO: 127 - protein, 252 aa, Artificial Sequence
  Description of Artificial Sequence: Synthetic single chain variable fragment
EVQLQQSGPELIKPGASVKMSCKASGYTFTSYVMHWVKQKPGQGLEWIGYINPYNDGTKYNEKFKGKATLTSDKSSSTAYMELSSLTSEDSAVYYCARGTYYYGSRVFDYWGQGTTLTVSSGGGGSGGGGSGGGGSDIVMTQAAPSIPVTPGESVSISCRSSKSLLNSNGNTYLYWFLQRPGQSPQLLIYRMSNLASGVPDRFSGSGSGTAFTLRISRVEAEDVGVYYCMQHLEYPFTFGAGTKLELKRSDP

SEQ ID NO: 128 - protein, 247 aa, Artificial Sequence
  Description of Artificial Sequence: Synthetic single chain variable fragment
QVQLQESGPGLVKPSETLSLTCTVSGVSLPDYGVSWIRQPPGKGLEWIGVIWGSETTYYSSSLKSRVTISKDNSKNQVSLKLSSVTAADTAVYYCAKHYYYGGSYAMDYWGQGTLVTVSSGGGGSGGGGSGGGGSGGGGSEIVMTQSPATLSLSPGERATLSCRASQDISKYLNWYQQKPGQAPRLLIYHTSRLHSGIPARFSGSGSGTDYTLTISSLQPEDFAVYFCQQGNTLPYTFGQGTKLEIK

SEQ ID NO: 129 - protein, 247 aa, Artificial Sequence
  Description of Artificial Sequence: Synthetic single chain variable fragment
QVQLQESGPGLVKPSETLSLTCTVSGVSLPDYGVSWIRQPPGKGLEWIGVIWGSETTYYQSSLKSRVTISKDNSKNQVSLKLSSVTAADTAVYYCAKHYYYGGSYAMDYWGQGTLVTVSSGGGGSGGGGSGGGGSGGGGSEIVMTQSPATLSLSPGERATLSCRASQDISKYLNWYQQKPGQAPRLLIYHTSRLHSGIPARFSGSGSGTDYTLTISSLQPEDFAVYFCQQGNTLPYTFGQGTKLEIK

SEQ ID NO: 130 - protein, 249 aa, Artificial Sequence
  Description of Artificial Sequence: Synthetic single chain variable fragment
EVQLVESGGGLVQPGRSLRLSCAASGFTFDDYAMHWVRQAPGKGLEWVSGISWNSGRIGYADSVKGRFTISRDNAKNSLFLQMNSLRAEDTAVYYCARDQGYHYYDSAEHAFDIWGQGTVVTVSSGGGGSGGGGSGGGGSQSVLTQPPSVSAAPGQEVTISCSGSSSNIGNNYVSWYQQLPGTAPKLLIYDNDKRPSGIPDRFSGSKSGTSATLGITGLQTGDEADYYCGTWDGNLSAVFGGGTKVTVL

SEQ ID NO: 131 - protein, 251 aa, Artificial Sequence
  Description of Artificial Sequence: Synthetic single chain variable fragment
EVQLVESGGGLVQPGRSLRLSCAASGFTFDDYAMHWVRQAPGKGLEWVSGISWNSGRIGYADSVKGRFTISRDNAKNSLFLQMNSLRAEDTAVYYCARDQGYHYYDSAEHAFDIWGQGTMVTVSSGGGGSGGGGSGGGGSQAVLTQPRSVSGSPGQSVTISCTGISSGVDSHRYVSWYQHHPGKAPKLMIYDFSKRPSGVPDRFSGSKSGNTASLTISGLQAEDEADYYCCSYAAISPNYVFGTGTKLTVL

SEQ ID NO: 132 - protein, 247 aa, Artificial Sequence
  Description of Artificial Sequence: Synthetic single chain variable fragment
EIVMTQSPATLSLSPGERATLSCRASQDISKYLNWYQQKPGQAPRLLIYHTSRLHSGIPARFSGSGSGTDYTLTISSLQPEDFAVYFCQQGNTLPYTFGQGTKLEIKGGGGSGGGGSGGGGSGGGGSQVQLQESGPGLVKPSETLSLTCTVSGVSLPDYGVSWIRQPPGKGLEWIGVIWGSETTYYNSSLKSRVTISKDNSKNQVSLKLSSVTAADTAVYYCAKHYYYGGSYAMDYWGQGTLVTVSS

SEQ ID NO: 133 - protein, 241 aa, Artificial Sequence
  Description of Artificial Sequence: Synthetic single chain variable fragment
QVQLQQSGPELVKPGASVKISCKASGYAFSSSWMNWVKQRPGKGLEWIGRIYPGDEDTNYSGKFKDKATLTADKSSTTAYMQLSSLTSEDSAVYFCARSLLYGDYLDYWGQGTTLTVSSGGGGSGGGGSGGGGSQIVLTQSPAIMSASPGEKVTMTCSASSSVSYMHWYQQKSGTSPKRWIYDTSKLASGVPDRFSGSGSGTSYFLTINNMEAEDAATYYCQQWNINPLTFGAGTKLELKR

SEQ ID NO: 134 - protein, 248 aa, Artificial Sequence; identical to SEQ ID NO: 87
  Description of Artificial Sequence: Synthetic single chain variable fragment

SEQ ID NO: 135 - protein, 246 aa, Artificial Sequence; identical to SEQ ID NO: 91
  Description of Artificial Sequence: Synthetic single chain variable fragment

SEQ ID NO: 136 - protein, 252 aa, Artificial Sequence; identical to SEQ ID NO: 92
  Description of Artificial Sequence: Synthetic single chain variable fragment

SEQ ID NO: 137 - protein, 249 aa, Artificial Sequence; identical to SEQ ID NO: 93
  Description of Artificial Sequence: Synthetic single chain variable fragment

SEQ ID NO: 138 - protein, 249 aa, Artificial Sequence; identical to SEQ ID NO: 94
  Description of Artificial Sequence: Synthetic single chain variable fragment

SEQ ID NO: 139 - protein, 251 aa, Artificial Sequence; identical to SEQ ID NO: 95
  Description of Artificial Sequence: Synthetic single chain variable fragment

SEQ ID NO: 140 - protein, 252 aa, Artificial Sequence; identical to SEQ ID NO: 96
  Description of Artificial Sequence: Synthetic single chain variable fragment

SEQ ID NO: 141 - protein, 252 aa, Artificial Sequence; identical to SEQ ID NO: 96
  Description of Artificial Sequence: Synthetic single chain variable fragment

SEQ ID NO: 142 - protein, 249 aa, Artificial Sequence
  Description of Artificial Sequence: Synthetic single chain variable fragment
  MOD_RES (64)..(65): Any amino acid
  MOD_RES (68)..(69): Any amino acid
  MOD_RES (93)..(93): Any amino acid
  MOD_RES (98)..(98): Any amino acid
  MOD_RES (102)..(102): Any amino acid
  MOD_RES (104)..(104): Any amino acid
  MOD_RES (113)..(113): Any amino acid
  MOD_RES (145)..(146): Any amino acid
  MOD_RES (148)..(149): Any amino acid
  MOD_RES (233)..(233): Any amino acid
  MOD_RES (244)..(244): Any amino acid
QVQLVESGGGLVQPGRSLRLSCAASGFTFDDYAMHWVRQAPGKGLEWVSGISWNSGRIGYADSXXGRXXISRDNAKNSLFLQMNSLRAEDTAXYYCAXDQGXHXYDSAEHAFXIWGQGTVVTVSSGGGGSGGGGSGGGGSQSVLXXPXXASGSPGQSVTVSCTGTGRDIGAYDYVSWYQQHPGKAPKLLIYGVNKRPSGVPDRFSGSKSDNTASLTVSGLQVEDEADYYCSSXAGRKYVFGTGXKVTVL

SEQ ID NO: 143 - protein, 252 aa, Artificial Sequence; identical to SEQ ID NO: 98
  Description of Artificial Sequence: Synthetic single chain variable fragment

SEQ ID NO: 144 - protein, 252 aa, Artificial Sequence; identical to SEQ ID NO: 98
  Description of Artificial Sequence: Synthetic single chain variable fragment

SEQ ID NO: 145 - protein, 252 aa, Artificial Sequence; identical to SEQ ID NO: 98
  Description of Artificial Sequence: Synthetic single chain variable fragment

SEQ ID NO: 146 - protein, 252 aa, Artificial Sequence; identical to SEQ ID NO: 101
  Description of Artificial Sequence: Synthetic single chain variable fragment
  MOD_RES (76)..(76): Any amino acid
  MOD_RES (201)..(201): Any amino acid

SEQ ID NO: 147 - protein, 252 aa, Artificial Sequence; identical to SEQ ID NO: 96
  Description of Artificial Sequence: Synthetic single chain variable fragment

SEQ ID NO: 148 - protein, 250 aa, Artificial Sequence; identical to SEQ ID NO: 103
  Description of Artificial Sequence: Synthetic single chain variable fragment

SEQ ID NO: 149 - protein, 252 aa, Artificial Sequence; identical to SEQ ID NO: 104
  Description of Artificial Sequence: Synthetic single chain variable fragment

SEQ ID NO: 150 - protein, 236 aa, Artificial Sequence; identical to SEQ ID NO: 105
  Description of Artificial Sequence: Synthetic single chain variable fragment

SEQ ID NO: 151 - protein, 251 aa, Artificial Sequence; identical to SEQ ID NO: 106
  Description of Artificial Sequence: Synthetic single chain variable fragment

SEQ ID NO: 152 - protein, 246 aa, Artificial Sequence; identical to SEQ ID NO: 107
  Description of Artificial Sequence: Synthetic single chain variable fragment

SEQ ID NO: 153 - protein, 239 aa, Artificial Sequence; identical to SEQ ID NO: 108
  Description of Artificial Sequence: Synthetic single chain variable fragment

SEQ ID NO: 154 - protein, 250 aa, Artificial Sequence; identical to SEQ ID NO: 109
  Description of Artificial Sequence: Synthetic single chain variable fragment

SEQ ID NO: 155 - protein, 251 aa, Artificial Sequence; identical to SEQ ID NO: 110
  Description of Artificial Sequence: Synthetic single chain variable fragment

SEQ ID NO: 156 - protein, 273 aa, Artificial Sequence
  Description of Artificial Sequence: Synthetic single chain variable fragment
MALPVTALLLPLALLLHAARPEVQLQQSGPELIKPGASVKMSCKASGYTFTSYVMHWVKQKPGQGLEWIGYINPYNDGTKYNEKFKGKATLTSDKSSSTAYMELSSLTSEDSAVYYCARGTYYYGSRVFDYWGQGTTLTVSSGGGGSGGGGSGGGGSDIVMTQAAPSIPVTPGESVSISCRSSKSLLNSNGNTYLYWFLQRPGQSPQLLIYRMSNLASGVPDRFSGSGSGTAFTLRISRVEAEDVGVYYCMQHLEYPFTFGAGTKLELKRSDP

SEQ ID NO: 157 - protein, 270 aa, Artificial Sequence
  Description of Artificial Sequence: Synthetic single chain variable fragment
MALPVTALLLPLALLLHAARPEVKLQESGPGLVAPSQSLSVTCTVSGVSLPDYGVSWIRQPPRKGLEWLGVIWGSETTYYNSALKSRLTIIKDNSKSQVFLKMNSLQTDDTAIYYCAKHYYYGGSYAMDYWGQGTSVTVSSGGGGSGGGGSGGGGSDIQMTQTTSSLSASLGDRVTISCRASQDISKYLNWYQQKPDGTVKLLIYHTSRLHSGVPSRFSGSGSGTDYSLTISNLEQEDIATYFCQQGNTLPYTFGGGTKLEITRSDPTSS

SEQ ID NO: 158 - protein, 277 aa, Artificial Sequence
  Description of Artificial Sequence: Synthetic single chain variable fragment
MAPAMESPTLLCVALLFFAPDGVLAEVQLQQSGPELIKPGASVKMSCKASGYTFTSYVMHWVKQKPGQGLEWIGYINPYNDGTKYNEKFKGKATLTSDKSSSTAYMELSSLTSEDSAVYYCARGTYYYGSRVFDYWGQGTTLTVSSGGGGSGGGGSGGGGSDIVMTQAAPSIPVTPGESVSISCRSSKSLLNSNGNTYLYWFLQRPGQSPQLLIYRMSNLASGVPDRFSGSGSGTAFTLRISRVEAEDVGVYYCMQHLEYPFTFGAGTKLELKRSDP

SEQ ID NO: 159 - protein, 246 aa, Artificial Sequence; identical to SEQ ID NO: 113
  Description of Artificial Sequence: Synthetic single chain variable fragment

SEQ ID NO: 160 - protein, 249 aa, Artificial Sequence; identical to SEQ ID NO: 114
  Description of Artificial Sequence: Synthetic single chain variable fragment

SEQ ID NO: 161 - protein, 249 aa, Artificial Sequence; identical to SEQ ID NO: 115
  Description of Artificial Sequence: Synthetic single chain variable fragment

SEQ ID NO: 162 - protein, 252 aa, Artificial Sequence; identical to SEQ ID NO: 98
  Description of Artificial Sequence: Synthetic single chain variable fragment

SEQ ID NO: 163 - protein, 251 aa, Artificial Sequence; identical to SEQ ID NO: 119
  Description of Artificial Sequence: Synthetic single chain variable fragment

SEQ ID NO: 164 - protein, 250 aa, Artificial Sequence; identical to SEQ ID NO: 120
  Description of Artificial Sequence: Synthetic single chain variable fragment

SEQ ID NO: 165 - protein, 247 aa, Artificial Sequence; identical to SEQ ID NO: 121
  Description of Artificial Sequence: Synthetic single chain variable fragment

SEQ ID NO: 166 - protein, 248 aa, Artificial Sequence; identical to SEQ ID NO: 122
  Description of Artificial Sequence: Synthetic single chain variable fragment

SEQ ID NO: 167 - protein, 251 aa, Artificial Sequence; identical to SEQ ID NO: 124
  Description of Artificial Sequence: Synthetic single chain variable fragment

SEQ ID NO: 168 - protein, 250 aa, Artificial Sequence; identical to SEQ ID NO: 126
  Description of Artificial Sequence: Synthetic single chain variable fragment

SEQ ID NO: 169 - protein, 249 aa, Artificial Sequence; identical to SEQ ID NO: 130
  Description of Artificial Sequence: Synthetic single chain variable fragment

SEQ ID NO: 170 - protein, 251 aa, Artificial Sequence; identical to SEQ ID NO: 131
  Description of Artificial Sequence: Synthetic single chain variable fragment

SEQ ID NO: 171 - protein, 249 aa, Artificial Sequence; identical to SEQ ID NO: 94
  Description of Artificial Sequence: Synthetic single chain variable fragment

SEQ ID NO: 172 - protein, 242 aa, Artificial Sequence; identical to SEQ ID NO: 85
  Description of Artificial Sequence: Synthetic single chain variable fragment

SEQ ID NO: 173 - protein, 245 aa, Artificial Sequence
  Description of Artificial Sequence: Synthetic single chain variable fragment
DIQMTQTTSSLSASLGDRVTISCRASQDISKYLNWYQQKPDGTVKLLIYHTSRLHSGVPSRFSGSGSGTDYSLTISNLEQEDIATYFCQQGNTLPYTFGGGTKLEITGSTSGSGKPGSGEGSTKGEVKLQESGPGLVAPSQSLSVTCTVSGVSLPDYGVSWIRQPPRKGLEWLGVIWGSETTYYNSALKSRLTIIKDNSKSQVFLKMNSLQTDDTAIYYCAKHYYYGGSYAMDYWGQGTSVTVSS

SEQ ID NO: 174 - protein, 119 aa, Artificial Sequence
  Description of Artificial Sequence: Synthetic single chain variable fragment
QVQLLESGAELVRPGSSVKISCKASGYAFSSYWMNWVKQRPGQGLEWIGQIYPGDGDTNYNGKFKGQATLTADKSSSTAYMQLSGLTSEDSAVYSCARKTISSVVDFYFDYWGQGTTVT

SEQ ID NO: 175 - protein, 438 aa, Artificial Sequence
  Description of Artificial Sequence: Synthetic single chain variable fragment
DIQMTQTTSSLSASLGDRVTISCRASQDISKYLNWYQQKPDGTVKLLIYHTSRLHSGVPSRFSGSGSGTDYSLTISNLEQEDIATYFCQQGNTLPYVKLQESGPGLVAPSQSLSVTCTVSGVSLPDYGVSWIRQPPRKGLEWLGVIWGSETTYYNSALKSRLTIIKDNSKSQVFLKMNSLQTDDTAIYYCAKHYYYGGSYAMDYWGQGTSVTVSSTTTPAPRPPTPAPTIASQPLSLRPEACRPAAGGAVHTRGLDFACDIYIWAPLAGTCGVLLLSLVITLYCKRGRKKLLYIFKQPFMRPVQTTQEEDGCSCRFPEEEEGGCELRVKFSRSADAPAYKQGQNQLYNELNLGRREEYDVLDKRRGRDPEMGGKPRRKNPQEGLYNELQKDKMAEAYSEIGMKGERRRGKGHDGLYQGLSTATKDTYDALHMQALPPR

SEQ ID NO: 176 - protein, 272 aa, Artificial Sequence
  Description of Artificial Sequence: Synthetic single chain variable fragment
MALPVTALLLPLALLLHAARPEVQLQQSGPELIKPGASVKMSCKASGYTFTSYVMHWVKQKPGQGLEWIGYINPYNDGTKYNEKFKGKATLTSDKSSSTAYMELSSLTSEDSAVYYCARGTYYYGSRVFDYWGQGTTLTVSSGGGGSGGGGSGGGGSDIVMTQAAPSIPVTPGESVSISCRSSKSLLNSNGNTYLYWFLQRPGQSPQLLIYRMSNLASGVPDRFSGSGSGTAFTLRISRVEAEDVGVYYCMQHLEYPFTFGAGTKLELKRSD

SEQ ID NO: 177 - protein, 267 aa, Artificial Sequence
  Description of Artificial Sequence: Synthetic single chain variable fragment
MALPVTALLLPLALLLHAARPEVQLQQSGPDLVKPGASVKISCKASGYSFTGYYMHWVKQSHGKSLEWIGRINPNNGVTLYNQKFKDKAILTVDKSSTTAYMELRSLTSEDSAVYYCARSTMITNYVMDYWGQVTSVTVSSGGGGSGGGGSGGGGSSIVMTQTPTFLLVSAGDRVTITCKASQSVSNDVAWYQQKPGQSPTLLISYTSSRYAGVPDRFIGSGYGTDFTFTISTLQAEDLAVYFCQQDYNSPPTFGGGTKLEIKRSDP

SEQ ID NO: 178 - protein, 270 aa, Artificial Sequence; identical to SEQ ID NO: 157
  Description of Artificial Sequence: Synthetic single chain variable fragment

SEQ ID NO: 179 - protein, 277 aa, Artificial Sequence; identical to SEQ ID NO: 158
  Description of Artificial Sequence: Synthetic single chain variable fragment

SEQ ID NO: 180 - protein, 242 aa, Artificial Sequence; identical to SEQ ID NO: 90
  Description of Artificial Sequence: Synthetic single chain variable fragment

SEQ ID NO: 181 - protein, 242 aa, Artificial Sequence; identical to SEQ ID NO: 111
  Description of Artificial Sequence: Synthetic single chain variable fragment

SEQ ID NO: 182 - protein, 242 aa, Artificial Sequence; identical to SEQ ID NO: 112
  Description of Artificial Sequence: Synthetic single chain variable fragment

SEQ ID NO: 183 - protein, 247 aa, Artificial Sequence; identical to SEQ ID NO: 118
  Description of Artificial Sequence: Synthetic single chain variable fragment

SEQ ID NO: 184 - protein, 247 aa, Artificial Sequence; identical to SEQ ID NO: 125
  Description of Artificial Sequence: Synthetic single chain variable fragment

SEQ ID NO: 185 - protein, 247 aa, Artificial Sequence; identical to SEQ ID NO: 128
  Description of Artificial Sequence: Synthetic single chain variable fragment

SEQ ID NO: 186 - protein, 247 aa, Artificial Sequence; identical to SEQ ID NO: 129
  Description of Artificial Sequence: Synthetic single chain variable fragment

SEQ ID NO: 187 - protein, 247 aa, Artificial Sequence; identical to SEQ ID NO: 132
  Description of Artificial Sequence: Synthetic single chain variable fragment

SEQ ID NO: 188 - protein, 247 aa, Artificial Sequence; identical to SEQ ID NO: 86
  Description of Artificial Sequence: Synthetic single chain variable fragment

SEQ ID NO: 189 - protein, 242 aa, Artificial Sequence; identical to SEQ ID NO: 88
  Description of Artificial Sequence: Synthetic single chain variable fragment

SEQ ID NO: 190 - protein, 495 aa, Artificial Sequence; identical to SEQ ID NO: 117
  Description of Artificial Sequence: Synthetic single chain variable fragment

SEQ ID NO: 191 - protein, 242 aa, Artificial Sequence; identical to SEQ ID NO: 89
  Description of Artificial Sequence: Synthetic single chain variable fragment

SEQ ID NO: 192 - protein, 242 aa, Artificial Sequence; identical to SEQ ID NO: 123
  Description of Artificial Sequence: Synthetic single chain variable fragment

SEQ ID NO: 193 - protein, 252 aa, Artificial Sequence; identical to SEQ ID NO: 127
  Description of Artificial Sequence: Synthetic single chain variable fragment

SEQ ID NO: 194 - protein, 250 aa, Artificial Sequence
  Description of Artificial Sequence: Synthetic single chain variable fragment
DIQMTQTTSSLSASLGDRVTISCRASQDISKYLNWYQQKPDGTVKLLIYHTSRLHSGVPSRFSGSGSGTDYSLTISNLEQEDIATYFCQQGNTLPYTFGGGTKLEITKAGGGGSGGGGSGGGGSGGGGSEVKLQESGPGLVAPSQSLSVTCTVSGVSLPDYGVSWIRQPPRKGLEWLGVIWGSETTYYNSALKSRLTIIKDNSKSQVFLKMNSLQTDDTAIYYCAKHYYYGGSYAMDYWGQGTSVTVSSD

SEQ ID NO: 195 - protein, 242 aa, Artificial Sequence; identical to SEQ ID NO: 123
  Description of Artificial Sequence: Synthetic single chain variable fragment

SEQ ID NO: 196 - protein, 251 aa, Artificial Sequence
  Description of Artificial Sequence: Synthetic single chain variable fragment
EVQLQQSGPELIKPGASVKMSCKASGYTFTSYVMHWVKQKPGQGLEWIGYINPYNDGTKYNEKFKGKATLTSDKSSSTAYMELSSLTSEDSAVYYCARGTYYYGSRVFDYWGQGTTLTVSSGGGGSGGGGSGGGGSDIVMTQAAPSIPVTPGESVSISCRSSKSLLNSNGNTYLYWFLQRPGQSPQLLIYRMSNLASGVPDRFSGSGSGTAFTLRISRVEAEDVGVYYCMQHLEYPFTFGAGTKLELKRAD

SEQ ID NO: 197 - protein, 271 aa, Artificial Sequence
  Description of Artificial Sequence: Synthetic single chain variable fragment
MALPVTALLLPLALLLHAARPEIVMTQSPATLSLSPGERATLSCRASQDISKYLNWYQQKPGQAPRLLIYHTSRLHSGIPARFSGSGSGTDYTLTISSLQPEDFAVYFCQQGNTLPYTFGQGTKLEIKGGGGSGGGGSGGGGSQVQLQESGPGLVKPSETLSLTCTVSGVSLPDYGVSWIRQPPGKGLEWIGVIWGSETTYYSSSLKSRVTISKDNSKNQVSLKLSSVTAADTAVYYCAKHYYYGGSYAMDYWGQGTLVTVSSHHHHHHHH

SEQ ID NO: 198 - protein, 248 aa, Artificial Sequence; identical to SEQ ID NO: 87
  Description of Artificial Sequence: Synthetic single chain variable fragment

SEQ ID NO: 199 - protein, 246 aa, Artificial Sequence; identical to SEQ ID NO: 91
  Description of Artificial Sequence: Synthetic single chain variable fragment

SEQ ID NO: 200 - protein, 252 aa, Artificial Sequence; identical to SEQ ID NO: 92
  Description of Artificial Sequence: Synthetic single chain variable fragment

SEQ ID NO: 201 - protein, 249 aa, Artificial Sequence; identical to SEQ ID NO: 93
  Description of Artificial Sequence: Synthetic single chain variable fragment

SEQ ID NO: 202 - protein, 251 aa, Artificial Sequence; identical to SEQ ID NO: 95
  Description of Artificial Sequence: Synthetic single chain variable fragment

SEQ ID NO: 203 - protein, 252 aa, Artificial Sequence; identical to SEQ ID NO: 96
  Description of Artificial Sequence: Synthetic single chain variable fragment

SEQ ID NO: 204 - protein, 249 aa, Artificial Sequence; identical to SEQ ID NO: 142
  Description of Artificial Sequence: Synthetic single chain variable fragment
  MOD_RES (64)..(65): Any amino acid
  MOD_RES (68)..(69): Any amino acid
  MOD_RES (93)..(93): Any amino acid
  MOD_RES (98)..(98): Any amino acid
  MOD_RES (102)..(102): Any amino acid
  MOD_RES (104)..(104): Any amino acid
  MOD_RES (113)..(113): Any amino acid
  MOD_RES (145)..(146): Any amino acid
  MOD_RES (148)..(149): Any amino acid
  MOD_RES (233)..(233): Any amino acid
  MOD_RES (244)..(244): Any amino acid

SEQ ID NO: 205 - protein, 252 aa, Artificial Sequence; identical to SEQ ID NO: 101
  Description of Artificial Sequence: Synthetic single chain variable fragment
  MOD_RES (76)..(76): Any amino acid
  MOD_RES (201)..(201): Any amino acid

SEQ ID NO: 206 - protein, 250 aa, Artificial Sequence; identical to SEQ ID NO: 103
  Description of Artificial Sequence: Synthetic single chain variable fragment

SEQ ID NO: 207 - protein, 252 aa, Artificial Sequence; identical to SEQ ID NO: 104
  Description of Artificial Sequence: Synthetic single chain variable fragment

SEQ ID NO: 208 - protein, 236 aa, Artificial Sequence; identical to SEQ ID NO: 105
  Description of Artificial Sequence: Synthetic single chain variable fragment

SEQ ID NO: 209 - protein, 251 aa, Artificial Sequence; identical to SEQ ID NO: 106
  Description of Artificial Sequence: Synthetic single chain variable fragment

SEQ ID NO: 210 - protein, 246 aa, Artificial Sequence; identical to SEQ ID NO: 107
  Description of Artificial Sequence: Synthetic single chain variable fragment

SEQ ID NO: 211 - protein, 239 aa, Artificial Sequence; identical to SEQ ID NO: 108
  Description of Artificial Sequence: Synthetic single chain variable fragment

SEQ ID NO: 212 - protein, 250 aa, Artificial Sequence; identical to SEQ ID NO: 109
  Description of Artificial Sequence: Synthetic single chain variable fragment

SEQ ID NO: 213 - protein, 251 aa, Artificial Sequence; identical to SEQ ID NO: 110
  Description of Artificial Sequence: Synthetic single chain variable fragment

SEQ ID NO: 214 - protein, 246 aa, Artificial Sequence; identical to SEQ ID NO: 113
  Description of Artificial Sequence: Synthetic single chain variable fragment

SEQ ID NO: 215 - protein, 249 aa, Artificial Sequence; identical to SEQ ID NO: 114
  Description of Artificial Sequence: Synthetic single chain variable fragment

SEQ ID NO: 216 - protein, 249 aa, Artificial Sequence; identical to SEQ ID NO: 115
  Description of Artificial Sequence: Synthetic single chain variable fragment

SEQ ID NO: 217 - protein, 252 aa, Artificial Sequence; identical to SEQ ID NO: 98
  Description of Artificial Sequence: Synthetic single chain variable fragment

SEQ ID NO: 218 - protein, 251 aa, Artificial Sequence; identical to SEQ ID NO: 119
  Description of Artificial Sequence: Synthetic single chain variable fragment

SEQ ID NO: 219 - protein, 250 aa, Artificial Sequence; identical to SEQ ID NO: 120
  Description of Artificial Sequence: Synthetic single chain variable fragment

SEQ ID NO: 220 - protein, 247 aa, Artificial Sequence; identical to SEQ ID NO: 121
  Description of Artificial Sequence: Synthetic single chain variable fragment

SEQ ID NO: 221 - protein, 248 aa, Artificial Sequence; identical to SEQ ID NO: 122
  Description of Artificial Sequence: Synthetic single chain variable fragment

SEQ ID NO: 222 - protein, 251 aa, Artificial Sequence; identical to SEQ ID NO: 124
  Description of Artificial Sequence: Synthetic single chain variable fragment

SEQ ID NO: 223 - protein, 250 aa, Artificial Sequence; identical to SEQ ID NO: 126
  Description of Artificial Sequence: Synthetic single chain variable fragment

SEQ ID NO: 224 - protein, 249 aa, Artificial Sequence; identical to SEQ ID NO: 130
  Description of Artificial Sequence: Synthetic single chain variable fragment

SEQ ID NO: 225 - protein, 251 aa, Artificial Sequence; identical to SEQ ID NO: 131
  Description of Artificial Sequence: Synthetic single chain variable fragment

SEQ ID NO: 226 - protein, 249 aa, Artificial Sequence; identical to SEQ ID NO: 94
  Description of Artificial Sequence: Synthetic single chain variable fragment

SEQ ID NO: 227 - protein, 277 aa, Artificial Sequence
  Description of Artificial Sequence: Synthetic single chain variable fragment
MAPAMESPTLLCVALLFFAPDGVLAEVQLQQSGPELIKPGASVKMSCKASGYTFTSYVMHWVKQKPGQGLEWIGYINPYNDGTKYNEKFKGKATLTSDKSSSTAYMELSSLTSEDSAVYYCARGTYYVGSRVFDYWGQGTTLTVSSGGGGSGGGGSGGGGSDIVMTQAAPSIPVTPGESVSISCRSSKSLLNSNGNTYLYWFLQRPGQSPQLLIYRMSNLASGVPDRFSGSGSGTAFTLRISRVEAEDVGVYVCMQHLEYPFTFGAGTKLELKRSDP

SEQ ID NO: 228 - protein, 120 aa, Homo sapiens
WRRKRKEKQSETSPKEFLTIYEDVKDLKTRRNHEQEQTFPGGGSTIYSMIQSQSSAPTSQEPAYTLYSLIQPSRKSGSRKRNHSPSFNSTIYEVIGKSQPKAQNPARLSRKELENFDVYS

SEQ ID NO: 229 - protein, 49 aa, Homo sapiens
HQRRKYRSNKGESPVEPAEPCRYSCPREEEGSTIPIQEDYRKPEPACSP

SEQ ID NO: 230 - protein, 111 aa, Homo sapiens
RRHQGKQNELSDTAGREINLVDAHLKSEQTEASTRQNSQVLLSETGIYDNDPDLCFRMQEGSEVYSNPCLEENKPGIVYASLNHSVIGPNSRLARNVKEAPTEYASICVRS

SEQ ID NO: 231 - protein, 114 aa, Homo sapiens
CCLRRHQGKQNELSDTAGREINLVDAHLKSEQTEASTRQNSQVLLSETGIYDNDPDLCFRMQEGSEVYSNPCLEENKPGIVYASLNHSVIGPNSRLARNVKEAPTEYASICVRS

SEQ ID NO: 232 - protein, 27 aa, Homo sapiens
FWVLVVVGGVLACYSLLVTVAFIIFWV

SEQ ID NO: 233 - protein, 42 aa, Homo sapiens
KRGRKKLLYIFKQPFMRPVQTTQEEDGCSCRFPEEEEGGCEL

SEQ ID NO: 234 - protein, 44 aa, Homo sapiens
FWVRSKRSRLLHSDYMNMTPRRPGPTRKHYQPYAPPRDFAAYRS

SEQ ID NO: 235 - protein, 41 aa, Homo sapiens
RSKRSRGGHSDYMNMTPRRPGPTRKHYQPYAPPRDFAAYRS

SEQ ID NO: 236 - protein, 43 aa, Homo sapiens
RSKRSRGGHSDYIVINMTPRRPGPTRKHYQPYAPPRDFAAYRS

SEQ ID NO: 237 - protein, 220 aa, Homo sapiens
MLRLLLALNLFPSIQVTGNKILVKQSPMLVAYDNAVNLSCKYSYNLFSREFRASLHKGLDSAVEVCVVYGNYSQQLQVYSKTGFNCDGKLGNESVTFYLQNLYVNQTDIYFCKIEVMYPPPYLDNEKSNGTIIHVKGKHLCPSPLFPGPSKPFWVLVVVGGVLACYSLLVTVAFIIFWVRSKRSRLLHSDYMNMTPRRPGPTRKHYQPYAPPRDFAAYRS

SEQ ID NO: 238 - protein, 187 aa, Homo sapiens
RRACRKRIRQKLHLCYPVQTSQPKLELVDSRPRRSSTQLRSGASVTEPVAEERGLMSQPLMETCHSVGAAYLESLPLQDASPAGGPSSPRDLPEPRVSTEHTNNKIEKIYIMKADTVIVGTVKAELPEGRGLAGPAEPELEEELEADHTPHYPEQETEPPLGSCSDVMLSVEEEGKEDPLPTAASGK

SEQ ID NO: 239 - protein, 187 aa, Homo sapiens; identical to SEQ ID NO: 238

SEQ ID NO: 240 - protein, 54 aa, Homo sapiens
HIWQLRSQCMWPRETQLLLEVPPSTEDARSCQFPEEERGERSAEEKGRLGDLWV

SEQ ID NO: 241 - protein, 60 aa, Homo sapiens
CVKRRKPRGDVVKVIVSVQRKRQEAEGEATVIEALQAPPDVTTVAVEETIPSFTGRSPNH

SEQ ID NO: 242 - protein, 35 aa, Homo sapiens
TKKKYSSSVHDPNGEYMFMRAVNTAKKSRLTDVTL

SEQ ID NO: 243 - protein, 38 aa, Homo sapiens
CWLTKKKYSSSVHDPNGEYMFMRAVNTAKKSRLTDVTL

SEQ ID NO: 244 - protein, 54 aa, Homo sapiens
HLWRRQWRPRRFSALEQGIHPPQAQSKIEELEQEPEPEPEPEPEPEPEPEPEQL

SEQ ID NO: 245 - protein, 42 aa, Homo sapiens
ALYLLRRDQRLPPDAHKPPGGGSFRTPIQEEQADAHSTLAKI

SEQ ID NO: 246 - protein, 37 aa, Homo sapiens
RRDQRLPPDAHKPPGGGSFRTPIQEEQADAHSTLAKI

SEQ ID NO: 247 - protein, 42 aa, Homo sapiens
KRGRKKLLYIFKQPFMRPVQTIQEEDGCSCRFPEEEEGGCEL

SEQ ID NO: 248 - protein, 42 aa, Homo sapiens
KRGRKKLLYIFKQPFMRPVQTTQEEDGCSCRFPEEEEGGYEL

SEQ ID NO: 249 - protein, 225 aa, Homo sapiens
TGTTTPAPRPPTPAPTIASQPLSLRPEACRPAAGGAVHTRGLDFACDIYIWAPLAGTCGVLLLSLVITLYCKRGRKKLLYIFKQPFMRPVQTTQEEDGCSCRFPEEEEGGCELRVKFSRSADAPAYQQGQNQLYNELNLGRREEYDVLDKRRGRDPEMGGKPRRKNPQEGLYNELQKDKMAEAYSEIGMKGERRRGKGHDGLYQGLSTATKDTYDALHMQALPPR

SEQ ID NO: 250 - protein, 154 aa, Homo sapiens
KRGRKKLLYIFKQPFMRPVQTTQEEDGCSCRFPEEEEGGCELRVKFSRSADAPAYQQGQNQLYNELNLGRREEYDVLDKRRGRDPEMGGKPRRKNPQEGLYNELQKDKMAEAYSEIGMKGERRRGKGHDGLYQGLSTATKDTYDALHMQALPPR

SEQ ID NO: 251 - protein, 194 aa, Homo sapiens
KRIKPIVWPSLPDHKKTLEHLCKKPRKNLNVSFNPESFLDCQIHRVDDIQARDEVEGFLQDTFPQQLEESEKQRLGGDVQSPNCPSEDVVITPESFGRDSSLTCLAGNVSACDAPILSSSRSLDCRESGKNGPHVYQDLLLSLGTTNSTLPPPFSLQSGILTLNPVAQGQPILTSLGSNQEEAYVTMSSFYQNQ

SEQ ID NO: 252 - protein, 47 aa, Homo sapiens
RFSVVKRGRKKLLYIFKQPFMRPVQTTQEEDGCSCRFPEEEEGGCEL

SEQ ID NO: 253 - protein, 341 aa, Homo sapiens
RKKRKDAKNNEVSFSQIKPKKSKLIRVENFEAYFKKQQADSNCGFAEEYEDLKLVGISQPKYAAELAENRGKNRYNNVLPYDISRVKLSVQTHSTDDYINANYMPGYHSKKDFIATQGPLPNTLKDFWRMVWEKNVYAIIMLTKCVEQGRTKCEEYWPSKQAQDYGDITVAMTSEIVLPEWTIRDFTVKNIQTSESHPLRQFHFTSWPDHGVPDTTDLLINFRYLVRDYMKQSPPESPILVHCSAGVGRTGTFIAIDRLIYQIENENTVDVYGIVYDLRMHRPLMVQTEDQYVFLNQCVLDIVRSQKDSKVDLIYQNTTAMTIYENLAPVTTFGKTNGYIA

SEQ ID NO: 254 - protein, 48 aa, Homo sapiens
QRRKYRSNKGESPVEPAEPCHYSCPREEEGSTIPIQEDYRKPEPACSP

SEQ ID NO: 255 - protein, 6 aa, Homo sapiens
FAAYRS

SEQ ID NO: 256 - protein, 68 aa, Homo sapiens
FWVLVVVGGVLACYSLLVTVAFIIFWVRSKRSRLLHSDYMNMTPRRPGPTRKHYQPYAPPRDFAAYRS

SEQ ID NO: 257 - protein, 41 aa, Homo sapiens
RSKRSRLLHSDYMNMTPRRPGPTRKHYQPYAPPRDFAAYRS

SEQ ID NO: 258 - protein, 40 aa, Homo sapiens
SKRSRLLHSDYMNMTPRRPGPTRKHYQPYAPPRDFAAYRS

SEQ ID NO: 259 - protein, 106 aa, Homo sapiens
IEVMYPPPYLDNEKSNGTIIHVKGKHLCPSPLFPGPSKPFWVLVVVGGVLACYSLLVTVAFIIFWRSKRSRLLHSDYMNMTPRRPGPTRKHYQPYAPPRDFAAYRS

SEQ ID NO: 260 - protein, 200 aa, Homo sapiens
RSKRSRLLHSDYMNMTPRRPGPTRKHYQPYAPPRDFAAYRSRFSVVKRGRKKLLYIFKQPFMRPVQTTQEEDGCSCRFPEEEEGGCELRVKFSRSADAPAYQQGQNQLYNELNLGRREEYDVLDKRRGRDPEMGGKPRRKNPQEGLYNELQKDKMAEAYSEIGMKGERRRGKGHDGLYQGLSTATKDTYDALHMQALPPR

SEQ ID NO: 261 - protein, 222 aa, Homo sapiens
AAAIEVMYPPPYLDNEKSNGTIIHVKGKHLCPSPLFPGPSKPFWVLVVVGGVLACYSLLVTVAFIIFWVRSKRSRLLHSDYMNMTPRRPGPTRKHYQPYAPPRDFAAYRSRVKFSRSADAPAYQQGQNQLYNELNLGRREEYDVLDKRRGRDPEMGGKPRRKNPQEGLYNELQKDKMAEAYSEIGMKGERRRGKGHDGLYQGLSTATKDTYDALHMQALPPR

SEQ ID NO: 262 - protein, 188 aa, Homo sapiens
RSKRSRLLHSDYNMTPRRPGPTRKHYQPYAPPRDFAAYRSRDQRLPPDAHKPPGGGSFRTPIQEEQADAHSTLAKIRVKFSRSADAPAYQQGQNQLYNELNLGRREEYDVLDKRRGRDPEMGGKPRRKNPQEGLYNELQKDKMAEAYSEIGMKGERRRGKGHDGLYQGLSTATKDTYDALHMQALPPR

SEQ ID NO: 263 - protein, 70 aa, Homo sapiens
MFWVLVVVGGVLACYSLLVTVAFIIFWVKRGRKKLLYIFKQPFMRPVQTTQEEDGCSCRFPEEEEGGCEL

SEQ ID NO: 264 - protein, 108 aa, Homo sapiens
IEVMYPPPYLDNEKSNGTIIHVKGKHLCPSPLFPGPSKPFWVLVVVGGVLACYSLLVTVAFIIFWVKRGRKKLLYIFKQPFMRPVQTTQEEDGCSCRFPEEEEGGCEL

SEQ ID NO: 265 - protein, 153 aa, Homo sapiens
RSKRSRLLHSDYMNMTPRRPGPTRKHYQPYAPPRDFAAYRSRVKFSRSADAPAYQQGQNQLYNELNLGRREEYDVLDKRRGRDPEMGGKPRRKNPQEGLYNELQKDKMAEAYSEIGMKGERRRGKGHDGLYQGLSTATKDTYDALHMQALPPR

SEQ ID NO: 266 - protein, 151 aa, Homo sapiens
KRSRLLHSDYMNMTPRRPGPTRKHYQPYAPPRDFAAYRSRVKFSRSADAPAYQQGQNQLYNELNLGRREEYDVLDKRRGRDPEMGGKPRRKNPQEGLYNELQKDKMAEAYSEIGMKGERRRGKGHDGLYQGLSTATKDTYDALHMQALPPR

SEQ ID NO: 267 - protein, 171 aa, Homo sapiens
MEHSTFLSGLVLATLLSQVSPFKIPIEELEDRVFVNCNTSITWVEGTVGTLLSDITRLDLGKRILDPRGIYRCNGTDIYKDKESTVQVHYRMCQSCVELDPATVAGIIVTDVIATLLLALGVFCFAGHETGRLSGAADTQALLRNDQVYQPLRDRDDAQYSHLGGNWARNK

SEQ ID NO: 268 - protein, 127 aa, Homo sapiens
MEHSTFLSGLVLATLLSQVSPFKIPIEELEDRVFVNCNTSITWVEGTVGTLLSDITRLDLGKRILDPRGIYRCNGTDIYKDKESTVQVHYRTADTQALLRNDQVYQPLRDRDDAQYSHLGGNWARNK

SEQ ID NO: 269 - protein, 21 aa, Homo sapiens
DQVYQPLRDRDDAQYSHLGGN

SEQ ID NO: 270 - protein, 171 aa, Homo sapiens; identical to SEQ ID NO: 267

SEQ ID NO: 271 - protein, 127 aa, Homo sapiens; identical to SEQ ID NO: 268

SEQ ID NO: 272 - protein, 21 aa, Homo sapiens
DQVYQPLRDRDDAQYSHLGGN

SEQ ID NO: 273 - protein, 207 aa, Homo sapiens
MQSGTHWRVLGLCLLSVGVWGQDGNEEMGGITQTPYKVSISGTTVILTCPQYPGSEILWQHNDKNIGGDEDDKNIGSDEDHLSLKEFSELEQSGYYVCYPRGSKPEDANFYLYLRARVCENCMEMDVMSVATIVIVDICITGGLLLLVYYWSKNRKAKAKPVTRGAGAGGRQRGQNKERPPPVPNPDYEPIRKGQRDLYSGLNQRRI

SEQ ID NO: 274 - protein, 21 aa, Homo sapiens
NPDYEPIRKGQRDLYSGLNQR

SEQ ID NO: 275 - protein, 182 aa, Homo sapiens
MEQGKGLAVLILAIILLQGTLAQSIKGNHLVKVYDYQEDGSVLLTCDAEAKNITWFKDGKMIGFLTEDKKKWNLGSNAKDPRGMYQCKGSQNKSKPLQVYYRMCQNCIELNAATISGFLFAEIVSIFVLAVGVYFIAGQDGVRQSRASDKQTLLPNDQLYQPLKDREDDQYSHLQGNQLRRN

SEQ ID NO: 276 - protein, 21 aa, Homo sapiens
DQLYQPLKDREDDQYSHLQGN

SEQ ID NO: 277 - protein, 21 aa, Homo sapiens
DQLYQPLKDREDDQYSHLQGN

SEQ ID NO: 278 - protein, 182 aa, Homo sapiens; identical to SEQ ID NO: 275

SEQ ID NO: 279 - protein, 163 aa, Homo sapiens
MKWKALFTAAILQAQLPITEAQSFGLLDPKLCYLLDGILFIYGVILTALFLRVKFSRSADAPAYQQGQNQLYNELNLGRREEYDVLDKRRGRDPEMGGKPRRKNPQEGLYNELQKDKMAEAYSEIGMKGERRRGKGHDGLYQGLSTATKDTYDALHMQALPPR

SEQ ID NO: 280 - protein, 164 aa, Homo sapiens
MKWKALFTAAILQAQLPITEAQSFGLLDPKLCYLLDGILFIYGVILTALFLRVKFSRSADAPAYQQGQNQLYNELNLGRREEYDVLDKRRGRDPEMGGKPQRRKNPQEGLYNELQKDKMAEAYSEIGMKGERRRGKGHDGLYQGLSTATKDTYDALHMQALPPR

SEQ ID NO: 281 - protein, 164 aa, Homo sapiens; identical to SEQ ID NO: 280

SEQ ID NO: 282 - protein, 21 aa, Homo sapiens
NQLYNELNLGRREEYDVLDKR

SEQ ID NO: 283 - protein, 112 aa, Homo sapiens
RVKFSRSADAPAYQQGQNQLYNELNLGRREEYDVLDKRRGRDPEMGGKPRRKNPQEGLYNELQKDKMAEAYSEIGMKGERRRGKGHDGLYQGLSTATKDTYDALHMQALPPR

SEQ ID NO: 284 - protein, 21 aa, Homo sapiens
DGLYQGLSTATKDTYDALHMQ

SEQ ID NO: 285 - protein, 112 aa, Homo sapiens
RVKFSRSAEPPAYQQGQNQLYNELNLGRREEYDVLDKRRGRDPEMGGKPRRKNPQEGLYNELQKDKMAEAYSEIGMKGERRRGKGHDGLYQGLSTATKDTYDALHMQALPPR

SEQ ID NO: 286 - protein, 113 aa, Homo sapiens
RVKFSRSADAPAYQQGQNQLYNELNLGRREEYDVLDKRRGRDPEMGGKPQRRKNPQEGLYNELQKDKMAEAYSEIGMKGERRRGKGHDGLYQGLSTATKDTYDALHMQALPPR

SEQ ID NO: 287 - protein, 114 aa, Homo sapiens
RSRVKFSRSADAPAYQQGQNQLYNELNLGRREEYDVLDKRRGRDPEMGGKPRRKNPQEGLYNELQKDKMAEAYSEIGMKGERRRGKGHDGLYQGLSTATKDTYDALHMQALPPR

SEQ ID NO: 288 - protein, 98 aa, Homo sapiens
RVKFSRSADAPAYQQGEYDVLDKRRGRDPEMGGKPRRKNPQEGLYNELQKDKMAEAYSEIGMKGERRRGKGHDGLYQGLSTATKDTYDALHMQALPPR

SEQ ID NO: 289 - protein, 112 aa, Homo sapiens
RVKFSRSADAPAYQQGQNQLYNELNLGRREEVDVLDKRRGRDPEMGGKPRRKNPQEGLYNELQKDKMAEAYSEIGMKGERRRGKGHDGLYQGLSTATKDTYDALHMQALPPR

SEQ ID NO: 290 - protein, 173 aa, Homo sapiens
MIPAVVLLLLLLVEQAAALGEPQLCYILDAILFLVGIVLTLLVCRLKIQVRKAAITSYEKSRVKFSRSADAPAYQQGQNQLYNELNLGRREEYDVLDKRRGRDPEMGGKPRRKNPQEGLYNELQKDKMAEAVSEIGMKGERRRGKGHDGLYQGLSTATKDTYDALHMQALPPR

SEQ ID NO: 291 - protein, 113 aa, Homo sapiens
LRVKFSRSADAPAYQQGQNQLYNELNLGRREEYDVLDKRRGRDPEMGGKPRRKNPQEGLYNELQKDKMAEAYSEIGMKGERRRGKGHDGLYQGLSTATKDTYDALHMQALPPR

SEQ ID NO: 292 - protein, 60 aa, Homo sapiens
RVKFSRSADAPAYQQGQNQLYNELNLGRREEYDVLDKRRGRDPEMGGKPQRRKNPQEGLY

SEQ ID NO: 293 - protein, 114 aa, Homo sapiens
LRVKFSRSADAPAYQQGQNQLYNELNLGRREEYDVLDKRRGRDPEMGGKPQRRKNPQEGLYNELQKDKMAEAYSEIGMKGERRRGKGHDGLYQGLSTATKDTYDALHMQALPPR

SEQ ID NO: 294 - protein, 113 aa, Homo sapiens
RRVKFSRSADAPAYQQGQNQLYNELNLGRREEYDVLDKRRGRDPEMGGKPRRKNPQEGLYNELQKDKMAEAYSEIGMKGERRRGKGHDGLYQGLSTATKDTYDALHMQALPPR

SEQ ID NO: 295 - protein, 21 aa, Homo sapiens
NQLYNELNLGRREEYDVLDKR

SEQ ID NO: 296 - protein, 22 aa, Homo sapiens
EGLYNELQKDKMAEAYSEIGMK

SEQ ID NO: 297 - protein, 21 aa, Homo sapiens
DGLYQGLSTATKDTYDALHMQ

SEQ ID NO: 298 - protein, 112 aa, Homo sapiens; identical to SEQ ID NO: 283

SEQ ID NO: 299 - protein, 112 aa, Homo sapiens
RVKFSRSADAPAYKQGQNQLYNELNLGRREEYDVLDKRRGRDPEMGGKPRRKNPQEGLYNELQKDKMAEAYSEIGMKGERRRGKGHDGLYQGLSTATKDTYDALHMQALPPR

SEQ ID NO: 300 - protein, 110 aa, Homo sapiens
RVKFSRSADAPAYQQGQNQLYNELNLGRREEYDVLDKRRGRDPEMGGKPRRKNPQEGLYNELQKDKMAEAYSEIGMKGERRRGKGHDGLYQGLSTATKDTYDALHMQALP

SEQ ID NO: 301 - protein, 137 aa, Homo sapiens
DPKLCYLLDGILFIYGVILTALFLRVKFSRSADAPAYQQGQNQLYNELNLGRREEYDVLDKRRGRDPEMGGKPQRRKNPQEGLYNELQKDKMAEAYSEIGMKGERRRGKGHDGLYQGLSTATKDTYDALHMQALPPR

SEQ ID NO: 302 - protein, 163 aa, Homo sapiens; identical to SEQ ID NO: 279

SEQ ID NO: 303 - protein, 38 aa, Homo sapiens
RSRDQRLPPDAHKPPGGGSFRTPIQEEQADAHSTLAKI

SEQ ID NO: 304 - protein, 226 aa, Homo sapiens
MPGGPGVLQALPATIFLLFLLSAVYLGPGCQALWMHKVPASLMVSLGEDAHFQCPHNSSNNANVTWWRVLHGNYTWPPEFLGPGEDPNGTLIIQNVNKSHGGIYVCRVQEGNESYQQSCGTYLRVRQPPPRPFLDMGEGTKNRIITAEGIILLFCAVVPGTLLLFRKRWQNEKLGLDAGDEYEDENLYEGLNLDDCSMYEDISRGLQGTYQDVGSLNIGDVQLEKP

SEQ ID NO: 305 - protein, 188 aa, Homo sapiens
MPGGPGVLQALPATIFLLFLLSAVYLGPGCQALWMHKVPASLMVSLGEDAHFQCPHNSSNNANVTWWRVLHGNYTWPPEFLGPGEDPNEPPPRPFLDMGEGTKNRIITAEGIILLFCAVVPGTLLLFRKRWQNEKLGLDAGDEYEDENLYEGLNLDDCSMYEDISRGLQGTYQDVGSLNIGDVQLEKP

SEQ ID NO: 306 - protein, 226 aa, Homo sapiens; identical to SEQ ID NO: 304

SEQ ID NO: 307 - protein, 21 aa, Homo sapiens
ENLYEGLNLDDCSMYEDISRG

SEQ ID NO: 308 - protein, 84 aa, Homo sapiens
FVPVFLPAKPTTTPAPRPPTPAPTIASQPLSLRPEACRPAAGGAVHTRGLDFACDIYIWAPLAGTCGVLLLSLVITLYCNHRNR

SEQ ID NO: 309 - protein, 84 aa, Homo sapiens
FVPVFLPAKPITTPAPRPPTPAPTIASQPLSLRPEACRPAAGGAVHTRGLDFACDIYIWAPLAGTCGVLLLSLVITLYCNHRNR

SEQ ID NO: 310 - protein, 47 aa, Homo sapiens
PTTTPAPRPPTPAPTIASQPLSLRPEACRPAAGGAVHTRGLDFACDI

SEQ ID NO: 311 - protein, 41 aa, Homo sapiens
AVSLSKMLKKRSPLTTGVFVKMAPTEAECEKQFQPYFIPIN

SEQ ID NO: 312 - protein, 47 aa, Homo sapiens
AVSLSKMLKKRSPLTTGVYMNMTPRRPECEKQFQPYAPPRDFAAYRS

SEQ ID NO: 313 - protein, 20 aa, Homo sapiens
RPRRSPAQDGKVYINMPGRG

SEQ ID NO: 314 - protein, 113 aa, Homo sapiens
MGGLEPCSRLLLLPLLLAVSGLRPVQAQAQSDCSCSTVSPGVLAGIVMGDLVLTVLIALAVYFLGRLVPRGRGAAEAATRKQRITETESPYQELQGQRSDVYSDLNTQRPYYK

SEQ ID NO: 315 - protein, 112 aa, Homo sapiens
MGGLEPCSRLLLLPLLLAVSGLRPVQAQAQSDCSCSTVSPGVLAGIVMGDLVLTVLIALAVYFLGRLVPRGRGAAEATRKQRITETESPYQELQGQRSDVYSDLNTQRPYYK

SEQ ID NO: 316 - protein, 102 aa, Homo sapiens
MGGLEPCSRLLLLPLLLAVSDCSCSTVSPGVLAGIVMGDLVLTVLIALAVYFLGRLVPRGRGAAEAATRKQRITETESPYQELQGQRSDVYSDLNTQRPYYK

SEQ ID NO: 317 - protein, 101 aa, Homo sapiens
MGGLEPCSRLLLLPLLLAVSDCSCSTVSPGVLAGIVMGDLVLTVLIALAVYFLGRLVPRGRGAAEATRKQRITETESPYQELQGQRSDVYSDLNTQRPYYK

SEQ ID NO: 318 - protein, 113 aa, Homo sapiens; identical to SEQ ID NO: 314

SEQ ID NO: 319 - protein, 112 aa, Homo sapiens; identical to SEQ ID NO: 315

SEQ ID NO: 320 - protein, 102 aa, Homo sapiens; identical to SEQ ID NO: 316

SEQ ID NO: 321 - protein, 101 aa, Homo sapiens; identical to SEQ ID NO: 317

SEQ ID NO: 322 - protein, 21 aa, Homo sapiens
ESPYQELQGQRSDVYSDLNTQ

SEQ ID NO: 323 - protein, 21 aa, Homo sapiens
ESPYQELQGQRSDVYSDLNTQ

SEQ ID NO: 324 - protein, 49 aa, Homo sapiens
RSQCMWPRETQLLLEVPPSTEDARSCQFPEEERGERSAEEKGRLGDLWV

SEQ ID NO: 325 - protein, 35 aa, Homo sapiens
TKKKYSSSVHDPNGEFMFMRAVNTAKKSRLTDVTL

SEQ ID NO: 326 - protein, 39 aa, Homo sapiens
KSRQTPPLASVEMEAMEALPVTWGTSSRDEDLENCSHHL

SEQ ID NO: 327 - protein, 149 aa, Homo sapiens
RRDQRLPPDAHKPPGGGSFRTPIQEEQADAHSTLAKIRVKFSRSADAPAYQQGQNQLYNELNLGRREEYDVLDKRRGRDPEMGGKPRRKNPQEGLYNELQKDKMAEAYSEIGMKGERRRGKGHDGLYQGLSTATKDTYDALHMQALPPR

SEQ ID NO: 328 - protein, 619 aa, Homo sapiens
MPDPAAHLPFFYGSISRAEAEEHLKLAGMADGLFLLRQCLRSLGGYVLSLVHDVRFHHFPIERQLNGTYAIAGGKAHCGPAELCEFYSRDPDGLPCNLRKPCNRPSGLEPQPGVFDCLRDAMVRDYVRQTWKLEGEALEQAIISQAPQVEKLIATTAHERMPWYHSSLTREEAERKLYSGAQTDGKFLLRPRKEQGTYALSLIYGKTVYHYLISQDKAGKYCIPEGTKFDTLWQLVEYLKLKADGLIYCLKEACPNSSASNASGAAAPTLPAHPSTLTHPQRRIDTLNSDGYTPEPARITSPDKPRPMPMDTSVYESPYSDPEELKDKKLFLKRDNLLIADIELGCGNFGSVRQGVYRMRKKQIDVAIKVLKQGTEKADTEEMMREAQIMHQLDNPYIVRLIGVCQAEALMLVMEMAGGGPLHKFLVGKREEIPVSNVAELLHQVSMGMKYLEEKNFVHRDLAARNVLLVNRHYAKISDFGLSKALGADDSYYTARSAGKWPLKWYAPECINFRKFSSRSDVWSYGVTMWEALSYGQKPYKKMKGPEVMAFIEQGKRMECPPECPPELYALMSDCWIYKWEDRPDFLTVEQRMRACYYSLASKVEGPPGSTQKAEAACA

SEQ ID NO: 329 - protein, 180 aa, Homo sapiens
MLRLLLALNLFPSIQVTGNKILVKQSPMLVAYDNAVNLSCKYSYNLFSREFRASLHKGLDSAVEVCVVYGNYSQQLQVYSKTGFNCDGKLGNESVTFYLQNLYVNQTDIYFCKIEVMYPPPYLDNEKSNGTIIHVKGKHLCPSPLFPGPSKPFWVLVVVGGVLACYSLLVTVAFIIFWVR

SEQ ID NO: 330 - protein, 240 aa, Homo sapiens
MGNSCYNIVATLLLVLNFERTRSLQDPCSNCPAGTFCDNNRNQICSPCPPNSFSSAGGQRTCDICRQCKGVFRTRKECSSTSNAECDCTPGFHCLGAGCSMCEQDCKQGQELTKKGCKDCCFGTFNDQKRGICRPWTNCSLDGKSVLVNGTKERDVVCGPSPADLSPGASSVTPPAPAREPGHSPQIISFFLALTSTALLFLLFFLTLRFSVVKRGRKKLLYIFKQPFMRPVQTTQEEDG

SEQ ID NO: 331 - protein, 86 aa, Homo sapiens
MIPAVVLLLLLLVEQAAALGEPQLCYILDAILFLYGIVLTLLYCRLKIQVRKAAITSYEKSDGVYTGLSTRNQETYETLKHEKPPQ

SEQ ID NO: 332 - protein, 21 aa, Homo sapiens
DGVYTGLSTRNQETYETLKHE

SEQ ID NO: 333 - protein, 66 aa, Homo sapiens
DPKLCYILDAILFLYGIVLTLLYCRLKIQVRKAAITSYEKSDGVYTGLSTRNQETYETLKHEKPPQ

SEQ ID NO: 334 - protein, 21 aa, Homo sapiens
DGVYTGLSTRNQETYETLKHE

SEQ ID NO: 335 - protein, 46 aa, Homo sapiens
TTTPAPRPPTPAPTIASQPLSLRPEACRPAAGGAVHTRGLDFACDI

SEQ ID NO: 336 - protein, 31 aa, Homo sapiens
IISFFLALTSTALLFLLFFLTLRFSVVKRGR

SEQ ID NO: 337 - protein, 27 aa, Homo sapiens
IISFFLALTSTALLFLLFFLTLRFSVV

SEQ ID NO: 338 - protein, 26 aa, Homo sapiens
VAAILGLGLVLGLLGPLAILLALYLL

SEQ ID NO: 339 - protein, 363 aa, Homo sapiens
AVFGCIFGALVIVTVGGFIFWRKKRKDAKNNEVSFSQIKPKKSKLIRVENFEAYFKKQQADSNCGFAEEYEDLKLVGISQPKYAAELAENRGKNRYNNVLPYDISRVKLSVQTHSTDDYINANYMPGYHSKKDFIATQGPLPNTLKDFWRMVWEKNVYAIIMLTKCVEQGRTKCEEYWPSKQAQDYGDITVAMTSEIVLPEVVTIRDFTVKNIQTSESHPLRQFHFTSWPDHGVPDTTDLLINFRYLVRDYMKQSPPESPILVHCSAGVGRTGTFIAIDRLIYQIENENTVDVYGIVYDLRMHRPLMVQTEDQYVFLNQCVLDIVRSQKDSKVDLIYQNTTAMTIYENLAPVTTFGKTNGYIA

SEQ ID NO: 340 - protein, 21 aa, Homo sapiens
AVFGCIFGALVIVTVGGFIFW

SEQ ID NO: 341 - protein, 185 aa, Homo sapiens
KEITNALETWGALGQDINLDIPSFQMSDDIDDIKWEKTSDKKKIAQFRKEKETFKEKDTYKLFKNGTLKIKHLKTDDQDIYKVSIYDTKGKNVLEKIFDLKIQERVSKPKISWTCINTTLTCEVMNGTDPELNLYQDGKHLKLSQRVITHKWTTSLSAKFKCTAGNKVSKESSVEPVSCPEKGLD

SEQ ID NO: 342 - protein, 106 aa, Homo sapiens
IEVMYPPPYLDNEKSNGTITHVKGKHLCPSPLFPGPSKPFWVLVVVGGVLACYSLLVTVAHIFWVRSKRSRLLHSDYMNMTPRRPGPTRKHYQPYAPPRDFAAYRS

SEQ ID NO: 343 - protein, 27 aa, Homo sapiens
FWVLVVVGGVLACYSLLVTVAFIIFWV

SEQ ID NO: 344 - protein, 66 aa, Homo sapiens
IEVMYPPPYLDNEKSNGTIIHVKGKHLCPSPLFPGPSKPFWVLVVVGGVLACYSLLVTVAFIIFWV

SEQ ID NO: 345 - protein, 33 aa, Homo sapiens
IFWVLVVVGGVLACYSLLVTVAFIIFWVRSKRR

SEQ ID NO: 346 - protein, 68 aa, Homo sapiens; identical to SEQ ID NO: 256

SEQ ID NO: 347 - protein, 28 aa, Homo sapiens
MFWVLVVVGGVLACYSLLVTVAFIIFWV

SEQ ID NO: 348 - protein, 26 aa, Homo sapiens
FWVLVVVGGVLACYSLLVTVAFHFWV

SEQ ID NO: 349 - protein, 28 aa, Homo sapiens
MFWVLVVVGGVLACYSGGVTVAFIIFWV

SEQ ID NO: 350 - protein, 26 aa, Homo sapiens
WVLVVVGGVLACYSLLVTVAFIIFWV

SEQ ID NO: 351 - protein, 69 aa, Homo sapiens
PFWVLVVVGGVLACYSLLVTVAFIIFWVRSKRSRLLHSDYMNMTPRRPGPTRKHYQPYAPPRDFAAYRS

SEQ ID NO: 352 - protein, 180 aa, Homo sapiens
FWVLVVVGGVLACYSLLVTVAFIIFWVRSKRSRLLHSDYMNMTPRRPGPTRKHYQPYAPPRDFAAYRSRVKFSRSADAPAYQQGQNQLYNELNLGRREEYDVLDKRRGRDPEMGGKPRRKNPQEGLYNELQKDKMAEAYSEIGMKGERRRGKGHDGLYQGLSTATKDTYDALHMQALPPR

SEQ ID NO: 353 - protein, 216 aa, Homo sapiens
FWVLVVVGGVLACYSLLVTVAFIIFWVRSKRSRLLHSDYMNMTPRRPGPTRKHYQPYAPPRDFAAYRSRDQRLPPDAHKPPGGGSFRTPIQEEQADAHSTLAKIRVKFSRSADAPAYQQGQNQLYNELNLGRREEYDVLDKRRGRDPEMGGKPRRKNPQEGLYNELQKDKMAEAYSEIGMKGERRRGKGHDGLYQGLSTATKDTYDALHMQALPPR

SEQ ID NO: 354 - protein, 140 aa, Homo sapiens
FWVLVVVGGVLACYSLLVTVAFIIFWVRRVKFSRSADAPAYQQGQNQLYNELNLGRREEYDVLDKRRGRDPEMGGKPRRKNPQEGLYNELQKDKMAEAYSEIGMKGERRRGKGHDGLYQGLSTATKDTYDALHMQALPPR

SEQ ID NO: 355 - protein, 222 aa, Homo sapiens; identical to SEQ ID NO: 261

SEQ ID NO: 356 - protein, 23 aa, Homo sapiens
LCYLLDGILFIYGVILTALFLRV

SEQ ID NO: 357 - protein, 51 aa, Homo sapiens
MKWKALFTAAILQAQLPITEAQSFGLLDPKLCYLLDGILFIYGVILTALFL

SEQ ID NO: 358 - protein, 21 aa, Homo sapiens
LCYLLDGILFIYGVILTALFL

SEQ ID NO: 359 - protein, 25 aa, Homo sapiens
ALIVLGGVAGLLLFIGLGIFFCVRC

SEQ ID NO: 360 - protein, 22 aa, Homo sapiens
MALIVLGGVAGLLLFIGLGIFF

SEQ ID NO: 361 - protein, 725 aa, Homo sapiens
ALIAFLAFLIIVTSIALLVVLYKIYDLHKKRSCNLDEQQELVERDDEKQLMNVEPIHADILLETYKRKIADEGRLFLAEFQSIPRVFSKFPIKEARKPFNQNKNRYVDILPYDYNRVELSEINGDAGSNYINASYIDGFKEPRKYIAAQGPRDETVDDFWRMIWEQKATVIVMVTRCEEGNRNKCAEYWPSMEEGTRAFGDVVVKINQHKRCPDYIIQKLNIVNKKEKATGREVTHIQFTSWPDHGVPEDPHLLLKLRRRVNAFSNFFSGPIWHCSAGVGRTGTYIGIDAMLEGLEAENKVDVYGYVVKLRRQRCLMVQVEAQYILIHQALVEYNQFGETEVNLSELHPYLHNMKKRDPPSEPSPLEAEFQRLPSYRSWRTQHIGNQEENKSKNRNSNVIPYDYNRVPLKHELEMSKESEHDSDESSDDDSDSEEPSKYINASFIMSYWKPEVMIAAQGPLKETIGDFWQMIFQRKVKVIVMLTELKHGDQEICAQYWGEGKQTYGDIEVDLKDTDKSSTYTLRVFELRHSKRKDSRTVYQYQYTNWSVEQLPAEPKELISMIQWKQKLPQKNSSEGNKHHKSTPLLIHCRDGSQQTGIFCALLNLLESAETEEWDIFQWKALRKARPGMVSTFEQYQFLYDVIASTYPAQNGQVKKNNHQEDKIEFDNEVDKVKQDANCVNPLGAPEKLPEAKEQAEGSEPTSGTEGPEHSVNGPASPALNQGS

SEQ ID NO: 362 - protein, 23 aa, Homo sapiens
PLFIPVAVMVTAFSGLAFIIWLA

SEQ ID NO: 363 - protein, 24 aa, Homo sapiens
ALPAALAVISFLLGLGLGVACVLA

SEQ ID NO: 364 - protein, 21 aa, Homo sapiens
MALPVTALLLPLALLLHAARP

SEQ ID NO: 365 - protein, 286 aa, Homo sapiens
AAAFVPVFLPAKPTTTPAPRPPTPAPTIASQPLSLRPEACRPAAGGAVHTRGLDFACDIYIWAPLAGTCGVLLLSLVITLYCNHRNRSKRSRLLHSDYMNMTPRRPGPTRKHYQPYAPPRDFAAYRSRFSVVKRGRKKLLYIFKQPFMRPVQTTQEEDGCSCRFPEEEEGGCELRVKFSRSADAPAYQQGQNQLYNELNLGRREEYDVLDKRRGRDPEMGGKPRRKNPQEGLYNELQKDKMAEAYSEIGMKGERRRGKGHDGLYQGLSTATKDTYDALHMQALPPR

SEQ ID NO: 366 - protein, 226 aa, Homo sapiens
AAATTTPAPRPPTPAPTIASQPLSLRPEACRPAAGGAVHTRGLDFACDIYIWAPLAGTCGVLLLSLVITLYCKRGRKKLLYIFKQPFMRPVQTTQEEDGCSCRFPEEEEGGCELRVKFSRSADAPAYKQGQNQLYNELNLGRREEYDVLDKRRGRDPEMGGKPRRKNPQEGLYNELQKDKMAEAYSEIGMKGERRRGKGHDGLYQGLSTATKDTYDALHMQALPPR

SEQ ID NO: 367 - protein, 83 aa, Homo sapiens
FVPVFLPAKPTTTPAPRPPTPAPTIASQPLSLRPEACRPAAGGAVHTRGLDFACDIYIWAPLAGTCGVLLLSLVITLYCNHRN

SEQ ID NO: 368 - protein, 22 aa, Homo sapiens
IWAPLAGTCGVLLLSLVITLYC

SEQ ID NO: 369 - protein, 24 aa, Homo sapiens
IYIWAPLAGTCGVLLLSLVITLYC

SEQ ID NO: 370 - protein, 25 aa, Homo sapiens
IYIWAPLAGTCGVLLLSLVITLYCR

SEQ ID NO: 371 - protein, 71 aa, Homo sapiens
PTTTPAPRPPTPAPTIASQPLSLRPEACRPAAGGAVHTRGLDFACDIYIWAPLAGTCGVLLLSLVITLYCN

SEQ ID NO: 372 - protein, 25 aa, Homo sapiens
IYIWAPLAGTCGVLLLSLVITLVCR

SEQ ID NO: 373 - protein, 21 aa, Homo sapiens
IYIWAPLAGTCGVLLLSLVIT

SEQ ID NO: 374 - protein, 23 aa, Homo sapiens
IYIWAPLAGTCGVLLLSLVITLY

SEQ ID NO: 375 - protein, 101 aa, Homo sapiens
APVGLVARLADESGHVVLRWLPPPETPMTSHIRYEVDVSAGNGAGSVQRVEILEGRTECVLSNLRGRTRYTFAVRARMAEPSFGGFWSAWSEPVSLLTPSD

SEQ ID NO: 376 - protein, 52 aa, Homo sapiens
FFIPLLVVILFAVDTGLFISTQQQVTFLLKIKRTRKGFRLLNPHPKPNPKNN

SEQ ID NO: 377 - protein, 257 aa, Homo sapiens
MAPAMESPTLLCVALLFFAPDGVLAVPQKPKVSLNPPWNRIFKGENVTLTCNGNNFFEVSSTKWFHNGSLSEETNSSLNIVNAKFEDSGEYKCQHQQVNESEPVYLEVFSDWLLLQASAEVVMEGQPLFLRCHGWRNWDVYKVIYYKDGEALKYWYENHNISITNATVEDSGTYYCTGKVWQLDYESEPLNITVIKAPREKYWLQFFIPLLVVILFAVDTGLFISTQQQVTFLLKIKRTRKGFRLLNPHPKPNPKNN

SEQ ID NO: 378 - protein, 244 aa, Homo sapiens
MDTESNRRANLALPQEPSSVPAFEVLEISPQEVSSGRLLKSASSPPLHTWLTVLKKEQEFLGVTQILTAMICLCFGTVVCSVLDISHIEGDIFSSFKAGYPFWGAIFFSISGMLSIISERRNATYLVRGSLGANTASSIAGGTGITILIINLKKSLAYIHIHSCQKFFETKCFMASFSTEIVVMMLFLTILGLGSAVSLTICGAGEELKGNKVPEDRVYEELNIYSATYSELEDPGEMSPPIDL

SEQ ID NO: 379 - protein, 86 aa, Homo sapiens; identical to SEQ ID NO: 331

SEQ ID NO: 380 - protein, 54 aa, Homo sapiens
DIFIPLLVVILFAVDTGLFISTQQQVTFLLKIKRTRKGFRLLNPHPKPNPKNNR

SEQ ID NO: 381 - protein, 31 aa, Homo sapiens
PLGWLTVVLLAVAACVLLLTSAQLGLHIWQL

SEQ ID NO: 382 - protein, 24 aa, Homo sapiens
SIISAVVGILLVVVLGVVFGILII

SEQ ID NO: 383 - protein, 113 aa, Homo sapiens
CHPECQPQNGSVTCFGPEADQCVACAHYKDPPFCVARCPSGVKPDLSYMPIWKFPDEEGACQPCPINCTHSCVDLDDKGCPAEQRASPLTSIISAVVGILLVVVLGVVFGILI

SEQ ID NO: 384 - protein, 21 aa, Homo sapiens
FLVIIVILSALFLGTLACFCV

SEQ ID NO: 385 - protein, 68 aa, Homo sapiens
FWVLVVVGGVLACYSLLVTVAFIIFWVRSKRSRLLHSDYMNMTPRRPGPTRKHYQAYAAARDFAAYRS

SEQ ID NO: 386 - protein, 5 aa, Homo sapiens
DKTHT

SEQ ID NO: 387 - protein, 4 aa, Homo sapiens
CPPC

SEQ ID NO: 388 - protein, 15 aa, Homo sapiens
CPEPKSCDTPPPCPR

SEQ ID NO: 389 - protein, 12 aa, Homo sapiens
ELKTPLGDTTHT

SEQ ID NO: 390 - protein, 10 aa, Homo sapiens
KSCDKTHTCP

SEQ ID NO: 391 - protein, 7 aa, Homo sapiens
KCCVDCP

SEQ ID NO: 392 - protein, 7 aa, Homo sapiens
KYGPPCP

SEQ ID NO: 393 - protein, 16 aa, Homo sapiens
VEPKSPDKTHTCPPCP

SEQ ID NO: 394 - protein, 16 aa, Homo sapiens
LDPKSSDKTHTCPPCP

SEQ ID NO: 395 - protein, 39 aa, Homo sapiens
IEVMYPPPYLDNEKSNGTIIHVKGKHLCPSPLFPGPSKP

SEQ ID NO: 396 - protein, 12 aa, Homo sapiens
GGAVHTRGLDFA

SEQ ID NO: 397 - protein, 45 aa, Homo sapiens
TTTPAPRPPTPAPTIASQPLSLRPEACRPAAGGAVHTRGLDFACD

SEQ ID NO: 398 - protein, 48 aa, Homo sapiens
AKPTTTPAPRPPTPAPTIASQPLSLRPEACRPAAGGAVHTRGLDFACD

SEQ ID NO: 399 - protein, 45 aa, Homo sapiens; identical to SEQ ID NO: 397

SEQ ID NO: 400 - protein, 45 aa, Homo sapiens; identical to SEQ ID NO: 397

SEQ ID NO: 401 - protein, 79 aa, Homo sapiens
TTTPAPRPPTPAPTIASQPLSLRPEACRPAAGGAVHTRGLDFACDEPKSPDKTHTCPPCPAPPVAGPSVFLFPPKPKDT

SEQ ID NO: 402 - protein, 51 aa, Homo sapiens
PAKPTTTPAPRPPTPAPTIASQPLSLRPEACRPAAGGAVHTRGLDFACDIY

SEQ ID NO: 403 - protein, 69 aa, Homo sapiens
TTTPAPRPPTPAPTIASQPLSLRPEACRPAAGGAVHTRGLDFACDIYIWAPLAGTCGVLLLSLVITLYC

SEQ ID NO: 404 - protein, 44 aa, Homo sapiens
TTPAPRPPTPAPTIASQPLSLRPEACRPAAGGAVHTRGLDFACD

SEQ ID NO: 405 - protein, 47 aa, Homo sapiens
TTTPAPRPPTPAPTIASQPLSLRPEACRPAAGGAVHTRGLDFACDIY

SEQ ID NO: 406 - protein, 11 aa, Homo sapiens
LDKTHTCPPCP

SEQ ID NO: 407 - protein, 101 aa, Homo sapiens; identical to SEQ ID NO: 375

SEQ ID NO: 408 - protein, 16 aa, Homo sapiens
GLAVSTISSFFPPGYQ

SEQ ID NO: 409 - protein, 16 aa, Homo sapiens
GLAVSTISSFFPPGYQ

SEQ ID NO: 410 - protein, 282 aa, Homo sapiens
RWPESPKAQASSVPTAQPQAEGSLAKATTAPATTRNTGRGGEEKKKEKEKEEQEERETKTPECPSHTQPLGVYLLTPAVQDLWLRDKATFTCFVVGSDLKDAHLTWEVAGKVPTGGVEEGLLERHSNGSQSQHSRLTLPRSLWNAGTSVTCTLNHPSLPPQRLMALREPAAQAPVKLSLNLLASSDPPEAASWLLCEVSGFSPPNILLMWLEDQREVNTSGFAPARPPPQPGSTTFWAWSVLRVPAPPSPQPATYTCVVSHEDSRTLLNASRSLEVSYVTDH

SEQ ID NO: 411 - protein, 246 aa, Homo sapiens
YVTVSSQDPAEPKSPDKTHTCPPCPAPELLGGPSVFLFPPKPKDTLMISRTPEVTCVVVDVSHEDPEVKFNWYVDGVEVHNAKTKPREEQYNSTYRVVSVLTVLHQDWLNGKEYKCKVSNKALPAPIEKTISKAKGQPREPQVYTLPPSRDELTKNQVSLTCLVKGFYPSDIAVEWESNGQPENNYKTTPPVLDSDGSFFLYSKLTVDKSRWQQGNVFSCSVMHEALHNHYTQKSLSLSPGKKDPK

SEQ ID NO: 412 - protein, 45 aa, Homo sapiens
KPTTTPAPRPPTPAPTIASQPLSLRPEACRPAAGGAVHTRGLDFA

SEQ ID NO: 413 - protein, 16 aa, Homo sapiens
LEPKSCDKTHTCPPCP

SEQ ID NO: 414 - protein, 43 aa, Homo sapiens
KPTTTPAPRPPTPAPTIASQPLSLRPEACRPAAGGAVHTRGLD

SEQ ID NO: 415 - protein, 15 aa, Homo sapiens
EPKSCDKTHTCPPCP

SEQ ID NO: 416 - protein, 16 aa, Homo sapiens
ELKTPLGDTHTCPRCP

SEQ ID NO: 417 - protein, 15 aa, Homo sapiens
EPKSCDTPPPCPRCP

SEQ ID NO: 418 - protein, 12 aa, Homo sapiens
ESKYGPPCPSCP

SEQ ID NO: 419 - protein, 12 aa, Homo sapiens
ERKCCVECPPCP

SEQ ID NO: 420 - protein, 229 aa, Homo sapiens
ESKYGPPCPPCPAPEFLGGPSVFLFPPKPKDTLMISRTPEVTCVVVDVSQEDPEVQFNWYVDGVEVHNAKTKPREEQFNSTYRVVSVLTVLHQDWLNGKEYKCKVSNKGLPSSIEKTISKAKGQPREPQVYTLPPSQEEMTKNQVSLTCLVKGFYPSDIAVEWESNGQPENNYKTTPPVLDSDGSFFLYSRLTVDKSRWQEGNVFSCSVMHEALHNHYTQKSLSLSLGK

SEQ ID NO: 421 - protein, 119 aa, Homo sapiens
ESKYGPPCPPCPGQPREPQVYTLPPSQEEMTKNQVSLTCLVKGFYPSDIAVEWESNGQPENNYKTTPPVLDSDGSFFLYSRLTVDKSRWQEGNVFSCSVMHEALHNHYTQKSLSLSLGK

SEQ ID NO: 422 - protein, 282 aa, Homo sapiens; identical to SEQ ID NO: 410

SEQ ID NO: 423 - protein, 281 aa, Homo sapiens
RWPESPKAQASSVPTAQPQAEGSLAKATTAPATTRNTGRGGEEKKKEKEKEEQEERETKTPECPSHTQPLGVYLLTPAVQDLWLRDKATFTCFVVGSDLKDAHLTWEVAGKVPTGGVEEGLLERHSNGSQSQHSRLTLPRSLWNAGTSVTCTLHPSLPPQRLMALREPAAQAPVKLSLNLLASSDPPEAASWLLCEVSGFSPPNILLMWLEDQREVNTSGFAPARPPPQPGSTTFWAWSVLRVPAPPSPQPATYTCVVSHEDSRTLLNASRSLEVSYVTDH

SEQ ID NO: 424 - protein, 283 aa, Homo sapiens
RWPESPKAQASSVPTAQPQAEGSLAKATTAPATTRNTGRGGEEKKKEKEKEEQEERETKTPECPSHTQPLGVYLLTPAVQDLWLRDKATFTCFVVGSDLKDAHLTWEVAGKVPTGGVEEGLLERHSNGSQSQHSRLTLPRSLWNAGTSVTCTLNHPSLPPQRLMALREPAAQAPVKLSLNLLASSDPPEAASWLLCEVSGFSPPNILLMVVLEDQREVNTSGFAPARPPPQPGSTTFWAWSVLRVPAPPSPQPATYTCVVSHEDSRTLLNASRSLEVSYVTDH

SEQ ID NO: 425 - protein, 58 aa, Homo sapiens
ESPKAQASSVPTAQPQAEGSLAKATTAPATTRNTGRGGEEKKKEKEKEEQEERETKTP

SEQ ID NO: 426 - protein, 282 aa, Homo sapiens; identical to SEQ ID NO: 410

SEQ ID NO: 427 - protein, 282 aa, Homo sapiens; identical to SEQ ID NO: 410

SEQ ID NO: 428 - protein, 282 aa, Homo sapiens; identical to SEQ ID NO: 410

SEQ ID NO: 429 - protein, 282 aa, Homo sapiens; identical to SEQ ID NO: 410

SEQ ID NO: 430 - protein, 234 aa, Homo sapiens
  MOD_RES (91)..(91): Any amino acid
AEPKSPDKTHTCPPCPAPPVAGPSVFLFPPKPKDTLMIARTPEVTCVVVDVSHEDPEVKFNWYVDGVEVHNAKTKPREEQYNSTYRVVSVXTVLHQDWLNGKEYKCKVSNKALPAPIEKTISKAKGQPREPQVYTLPPSRDELTKNQVSLTCLVKGFYPSDIAVEWESNGQPENNYKTTPPVLDSDGSFFLYSKLTVDKSRWQQGNVFSCSVMHEALHNHYTQKSLSLSPGKKD

SEQ ID NO: 431 - protein, 234 aa, Homo sapiens
AEPKSPDKTHTCPPCPAPPVAGPSVFLFPPKPKDTLMIARTPEVTCVVVDVSHEDPEVKFNWYVDGVEVHNAKTKPREEQYNSTYRVVSVLTVLHQDWLNGKEYKCKVSNKALPAPIEKTISKAKGQPREPQVYTLPPSRDELTKNQVSLTCLVKGFYPSDIAVEWESNGQPENNYKTTPPVLDSDGSFFLYSKLTVDKSRWQQGNVFSCSVMHEALHNHYTQKSLSLSPGKKD

SEQ ID NO: 432 - protein, 20 aa, Homo sapiens
AEPKSPDKTHTCPPCPKDPK

SEQ ID NO: 433 - protein, 15 aa, Homo sapiens
EPKSCDKTHTCPPCP

SEQ ID NO: 434 - protein, 233 aa, Homo sapiens
EPKSPDKTHTCPPCPAPPVAGPSVFLFPPKPKDTLMIARTPEVTCVVVDVSHEDPEVKFNWYVDGVEVHNAKTKPREEQYNSTYRVVSVLTVLHQDWLNGKEVKCKVSNKALPAPIEKTISKAKGQPREPQVYTLPPSRDELTKNQVSLTCLVKGFYPSDIAVEWESNGQPENNYKTTPPVLDSDGSFFLVSKLTVDKSRWQQGNVFSCSVMHEALHNHYTQKSLSLSPGKKD

SEQ ID NO: 435 - protein, 13 aa, Homo sapiens
SVFLFPPKPKDTL

SEQ ID NO: 436 - protein, 231 aa, Homo sapiens
EPKSPDKTHTCPPCPAPPVAGPSVFLFPPKPKDTLMIARTPEVTCVVVDVSHEDPEVKFNWYVDGVEVHNAKTKPREEQYNSTYRVVSVLTVLHQDWLNGKEYKCKVSNKALPAPIEKTISKAKGQPREPQVYTLPPSRDELTKNQVSLTCLVKGFYPSDIAVEWESNGQPENNYKTTPPVLDSDGSFFLYSKLTVDKSRWQQGNVFSCSVMHEALHNHYTQKSLSLSPGK

SEQ ID NO: 437 - protein, 235 aa, Homo sapiens
EPKSPDKTHTCPPCPAPPVAGPSVFLFPPKPKDTLMIARTPEVTCVVVDVSHEDPEVKFNWYVDGVEVHNAKTKPREEQYNSTYRVVSVLTVLHQDWLNGKEYKCKVSNKALPAPIEKTISKAKGQPREPQVYTLPPSRDELTKNQVSLTCLVKGFYPSDIAVEWESNGQPENNYKTTPPVLDSDGSFFLYSKLTVDKSRWQQGNVFSCSVMHEALHNHYTQKSLSLSPGKKDPK

SEQ ID NO: 438 - protein, 223 aa, Homo sapiens
VECPPCPAPPVAGPSVFLFPPKPKDTLMISRTPEVTCVVVDVSHEDPEVKFNWYVDGVEVHNAKTKPREEQYNSTYRVVSVLTVLHQDWLNGKEYKCKVSNKGLPSSIEKTISKAKGQPREPQVYTLPPSREEMTKNQVSLTCLVKGFYPSDIAVEWESNGQPENNYKTTPPVLDSDGSFFLYSKLTVDKSRWQQGNVFSCSVMHEALHNHYTQKSLSLSPGK

SEQ ID NO: 439 - protein, 235 aa, Homo sapiens
DPAEPKSPDKTHTCPPCPAPPVAGPSVFLFPPKPKDTLMIARTPEVTCVVVDVSHEDPEVKFNWYVDGVEVHNAKTKPREEQYNSTYRVVSVLTVLHQDWLNGKEYKCKVSNKALPAPIEKTISKAKGQPREPQVYTLPPSRDELTKNQVSLTCLVKGFYPSDIAVEWESNGQPENNYKTTPPVLDSDGSFFLYSKLTVDKSRWQQGNVFSCSVMHEALHNHYTQKSLSLSPGKK

SEQ ID NO: 440 - protein, 12 aa, Homo sapiens
ERKCCVECPPCP

SEQ ID NO: 441 - protein, 17 aa, Homo sapiens
ELKTPLGDTTHTCPRCP

SEQ ID NO: 442 - protein, 61 aa, Homo sapiens
ELKTPLGDTHTCPRCPEPKSCDTPPPCPRCPEPKSCDTPPPCPRCPEPKSCDTPPPCPRCP

SEQ ID NO: 443 - protein, 230 aa, Homo sapiens
ESKYGPPCPPCPAPEFLGGPSVFLFPPKPKDTLMISRTPEVTCVVVDVSQEDPEVQFNWYVDGVEVHNAKTKPREEQFNSTYRVVSVLTVLHQDWLNGKEYKCKVSNKGLPSSIEKTISKAKGQPREPQVYTLPPSQEEMTKNQVSLTCLVKGFYPSDIAVEWESNGQPENNYKTTPPVLDSDGSFFLYSRLTVDKSRWQEGNVFSCSVMHEALHNHYTQKSLSLSLGKM

SEQ ID NO: 444 - protein, 230 aa, Homo sapiens
ESKYGPPCPPCPAPEFEGGPSVFLFPPKPKDTLMISRTPEVTCVVVDVSQEDPEVQFNWYVDGVEVHNAKTKPREEQFQSTYRVVSVLTVLHQDWLNGKEYKCKVSNKGLPSSIEKTISKAKGQPREPQVYTLPPSQEEMTKNQVSLTCLVKGFYPSDIAVEWESNGQPENNYKTTPPVLDSDGSFFLYSRLTVDKSRWQEGNVFSCSVMHEALHNHYTQKSLSLSLGKM

SEQ ID NO: 445 - protein, 12 aa, Homo sapiens
SPNMVPHAHHAQ

SEQ ID NO: 446 - protein, 107 aa, Homo sapiens
GQPREPQVYTLPPSQEEMTKNQVSLTCLVKGFYPSDIAVEWESNGQPENNYKTTPPVLDSDGSFFLYSRLTVDKSRWQEGNVFSCSVMHEALHNHYTQKSLSLSLGK

SEQ ID NO: 447 - protein, 129 aa, Homo sapiens
ESKYGPPCPPCPGGGSSGGGSGGQPREPQVYTLPPSQEEMTKNQVSLTCLVKGFYPSDIAVEWESNGQPENNYKTTPPVLDSDGSFFLYSRLTVDKSRWQEGNVFSCSVMHEALHNHYTQKSLSLSLGK

SEQ ID NO: 448 - protein, 229 aa, Homo sapiens
ESKYGPPCPSCPAPEFEGGPSVFLFPPKPKDTLMISRTPEVTCVVVDVSQEDPEVQFNWYVDGVEVHQAKTKPREEQFNSTYRVVSVLTVLHQDWLNGKEYKCKVSNKGLPSSIEKTISKAKGQPREPQVYTLPPSQEEMTKNQVSLTCLVKGFVPSDIAVEWESNGQPENNYKTTPPVLDSDGSFFLYSRLTVDKSRWQEGNVFSCSVMHEALHNHYTQKSLSLSLGK

SEQ ID NO: 449 - protein, 229 aa, Homo sapiens
ESKYGPPCPPCPAPEFEGGPSVFLFPPKPKDTLMISRTPEVTCVVVDVSQEDPEVQFNWYVDGVEVHQAKTKPREEQFNSTYRVVSVLTVLHQDWLNGKEYKCKVSNKGLPSSIEKTISKAKGQPREPQVYTLPPSQEEMTKNQVSLTCLVKGFVPSDIAVEWESNGQPENNYKTTPPVLDSDGSFFLYSRLTVDKSRWQEGNVFSCSVMHEALHNHYTQKSLSLSLGK

SEQ ID NO: 450 - protein, 230 aa, Homo sapiens; identical to SEQ ID NO: 443

SEQ ID NO: 451 - DNA, 36 bp, Homo sapiens
gaatctaagtacggaccgccctgccccccttgccct

SEQ ID NO: 452 - protein, 12 aa, Homo sapiens
ESKYGPPCPPCP

SEQ ID NO: 453 - protein, 119 aa, Homo sapiens; identical to SEQ ID NO: 421

SEQ ID NO: 454 - protein, 229 aa, Homo sapiens; identical to SEQ ID NO: 420

SEQ ID NO: 455 - protein, 229 aa, Homo sapiens; identical to SEQ ID NO: 420

SEQ ID NO: 456 - protein, 12 aa, Homo sapiens
ESKYGPPCPPCP

SEQ ID NO: 457 - protein, 9 aa, Homo sapiens
YGPPCPPCP

SEQ ID NO: 458 - protein, 10 aa, Homo sapiens
KYGPPCPPCP

SEQ ID NO: 459 - protein, 13 aa, Homo sapiens
EVVKYGPPCPPCP

SEQ ID NO: 460 - protein, 229 aa, Homo sapiens
ESKYGPPCPSCPAPEFLGGPSVFLFPPKPKDTLMISRTPEVTCVVVDVSQEDPEVQFNWYVDGVEVHNAKTKPREEQFNSTYRVVSVLTVLHQDWLNGKEYKCKVSNKGLPSSIEKTISKAKGQPREPQVYTLPPSQEEMTKNQVSLTCLVKGFYPSDIAVEWESNGQPENNYKTTPPVLDSDGSFFLYSRLTVDLSRWQEGNVFSCSVMHEALHNHYTQKSLSLSLGK

SEQ ID NO: 461 - protein, 22 aa, Homo sapiens
ESKYGPPCPPCPGGGSSGGGSG

SEQ ID NO: 462 - protein, 231 aa, Homo sapiens
EPKSPDKTHTCPPCPAPPVAGPSVFLFPPKPKDTLMIARTPEVTCVVVDVSHEDPEVKFNWYVDGVEVHNAKTKPREEQYNSTYRVVSVLTVLHQDWLNGKEYKCKVSNKALPAPIEKTISKAKGQPREPQVYTLPPSRDELTKNQVSLTCLVKGFYPSDIAVEWESNGQPENNYKTIPPVLDSDGSFFLYSKLTVDKSRWQQGNVFSCSVMHEALHNHYTQKSLSLSPGK

SEQ ID NO: 463 - protein, 231 aa, Homo sapiens
EPKSPDKTHTCPPCPAPPVAGPSVFLFPPKPKDTLMIARTPEVTCVVVDVSHEDPEVKFNWYVDGVEVHNAKTKPREEQYNSTYRVVSVLTVLHQDWLNGKEYKCKVSNKALPAPLEKTISKAKGQPREPQVYTLPPSRDELTKNQVSLTCLVKGFYPSDIAVEWESNGQPENNYKTIPPVLDSDGSFFLYSKLTVDKSRWQQGNVFSCSVMHEALHNHYTQKSLSLSPGK

SEQ ID NO: 464 - protein, 231 aa, Homo sapiens; identical to SEQ ID NO: 436

SEQ ID NO: 465 - protein, 242 aa, Artificial Sequence; identical to SEQ ID NO: 123
  Description of Artificial Sequence: Synthetic CD19 scFv sequence

SEQ ID NO: 466 - protein, 69 aa, Homo sapiens; identical to SEQ ID NO: 403

SEQ ID NO: 467 - DNA, 726 bp, Artificial Sequence
  Description of Artificial Sequence: Synthetic CD19 scFv sequence
gacatccagatgacacagactacatcctccctgtctgcctctctgggagacagagtcaccatcagttgcagggcaagtcaggacattagtaaatatttaaattggtatcagcagaaaccagatggaactgttaaactcctgatctaccatacatcaagattacactcaggagtcccatcaaggttcagtggcagtgggtctggaacagattattctctcaccattagcaacctggagcaagaagatattgccacttacttttgccaacagggtaatacgcttccgtacacgttcggaggggggaccaagctggagatcacaggtggcggtggctcgggcggtggtgggtcgggtggcggcggatctgaggtgaaactgcaggagtcaggacctggcctggtggcgccctcacagagcctgtccgtcacatgcactgtctcaggggtctcattacccgactatggtgtaagctggattcgccagcctccacgaaagggtctggagtggctgggagtaatatggggtagtgaaaccacatactataattcagctctcaaatccagactgaccatcatcaaggacaactccaagagccaagttttcttaaaaatgaacagtctgcaaactgatgacacagccatttactactgtgccaaacattattactacggtggtagctatgctatggactactggggccaaggaacctcagtcaccgtctcctca

SEQ ID NO: 468 - DNA, 207 bp, Artificial Sequence
  Description of Artificial Sequence: Synthetic Construct
accacaaccccagcacctcgcccaccaacaccagcaccaaccatcgcatcccagccactgtctctgaggcccgaggcatgtaggcctgcagcaggaggcgccgtgcacaccaggggcctggactttgcctgcgatatctatatctgggcaccactggcaggaacatgtggcgtgctgctgctgtccctggtcatcaccctgtattgc

SEQ ID NO: 469 - protein, 21 aa, Homo sapiens
MALPVTALLLPLALLLHAARP

SEQ ID NO: 470 - protein, 5 aa, Artificial Sequence
  Description of Artificial Sequence: Synthetic Linker
GGSGG

SEQ ID NO: 471 - protein, 12 aa, Artificial Sequence
  Description of Artificial Sequence: Synthetic Cleavage site
ESRRVRRNKRSK

SEQ ID NO: 472 - DNA, 918 bp, Artificial Sequence
  Description of Artificial Sequence: Synthetic Payload sequence
atctgggagctgaagaaggacgtgtacgtggtggagctggactggtatcccgatgcccctggcgagatggtggtgctgacctgcgacacacctgaggaggatggcatcacctggacactggatcagagctccgaggtgctgggaagcggcaagaccctgacaatccaggtgaaggagttcggcgacgccggccagtacacatgtcacaagggcggcgaggtgctgtctcacagcctgctgctgctgcacaagaaggaggacggcatttggtccacagacatcctgaaggatcagaaggagccaaagaacaagaccttcctgcggtgcgaggccaagaattatagcggccggttcacctgttggtggctgaccacaatcagcaccgatctgacattttccgtgaagtctagccggggctcctctgacccacagggagtgacatgcggagcagccaccctgtccgccgagcgggtgagaggcgataacaaggagtacgagtattccgtggagtgccaggaggactctgcctgtcctgcagcagaggagagcctgccaatcgaagtgatggtggatgccgtgcacaagctgaagtacgagaattatacaagctccttctttatcagggacatcatcaagcctgatccccctaagaacctgcagctgaagccactgaagaattctcgccaggtggaggtgagctgggagtacccagacacctggtccacaccccactcttatttcagcctgaccttttgcgtgcaggtgcagggcaagtccaagcgggagaagaaggacagagtgttcaccgataagacatctgccaccgtgatctgtcggaagaacgcctccatctctgtgagggcccaggatcgctactattctagctcctggagcgagtgggcatccgtgccatgttct

SEQ ID NO: 473 - DNA, 918 bp, Artificial Sequence
  Description of Artificial Sequence: Synthetic Payload sequence
atctgggagctcaagaaagacgtgtacgtggtggaactggactggtaccccgacgcccctggcgaaatggtggtgctgacatgcgacacccctgaggaggatggcattacctggaccctcgatcagagctccgaggtgctgggcagcggcaaaaccctgaccatccaggtgaaggagtttggcgatgccggccagtacacatgtcacaagggcggcgaggtgctgagccactccctgctgctgctccacaagaaggaagatggcatctggagcaccgacattctgaaggatcagaaggagcccaagaacaagacattcctgaggtgtgaggccaagaactacagcggcaggtttacctgctggtggctgacaacaatcagcaccgacctcacattctccgtcaagtcctccaggggttcttccgaccctcaaggcgtgacatgcggcgctgccaccctgagcgctgagagagtcaggggcgacaacaaggagtacgagtacagcgtcgaatgtcaggaggacagcgcctgtcccgccgctgaagagagcctgcctatcgaggtgatggtggacgccgtgcacaaactgaagtatgagaattacacctccagcttcttcatcagggacatcatcaaacccgatccccccaagaacctgcagctgaagcctctgaagaacagcagacaggtcgaagtgtcctgggagtaccctgatacctggtccacaccccacagctacttcagcctgaccttttgcgtgcaggtgcagggcaagagcaaaagggagaagaaggacagggtgtttaccgacaagacctccgccacagtgatttgcagaaagaacgcctccatcagcgtgagggcccaggacaggtattacagcagctcctggagcgaatgggctagcgtgccctgtagc

SEQ ID NO: 474 - DNA, 918 bp, Artificial Sequence; identical to SEQ ID NO: 473
  Description of Artificial Sequence: Synthetic Payload sequence

SEQ ID NO: 475 - protein, 486 aa, Artificial Sequence
  Description of Artificial Sequence: Synthetic Construct
MALPVTALLLPLALLLHAARPDIQMTQTTSSLSASLGDRVTISCRASQDISKYLNWYQQKPDGTVKLLIYHTSRLHSGVPSRFSGSGSGTDYSLTISNLEQEDIATYFCQQGNTLPYTFGGGTKLEITGGGGSGGGGSGGGGSEVKLQESGPGLVAPSQSLSVTCTVSGVSLPDYGVSWIRQPPRKGLEWLGVIWGSETTYYNSALKSRLTIIKDNSKSQVFLKMNSLQTDDTAIYYCAKHYYYGGSYAMDYWGQGTSVTVSSTTTPAPRPPTPAPTIASQPLSLRPEACRPAAGGAVHTRGLDFACDIYIWAPLAGTCGVLLLSLVITLYCKRGRKKLLYIFKQPFMRPVQTTQEEDGCSCRFPEEEEGGCELRVKFSRSADAPAYKQGQNQLYNELNLGRREEYDVLDKRRGRDPEMGGKPRRKNPQEGLYNELQKDKMAEAYSEIGMKGERRRGKGHDGLYQGLSTATKDTYDALHMQALPPR

SEQ ID NO: 476 - protein, 593 aa, Artificial Sequence
  Description of Artificial Sequence: Synthetic Construct
MALPVTALLLPLALLLHAARPDIQMTQTTSSLSASLGDRVTISCRASQDISKYLNWYQQKPDGTVKLLIYHTSRLHSGVPSRFSGSGSGTDYSLTISNLEQEDIATYFCQQGNTLPYTFGGGTKLEITGGGGSGGGGSGGGGSEVKLQESGPGLVAPSQSLSVTCTVSGVSLPDYGVSWIRQPPRKGLEWLGVIWGSETTYYNSALKSRLTIIKDNSKSQVFLKMNSLQTDDTAIYYCAKHYYYGGSYAMDYWGQGTSVTVSSGVQVETISPGDGRTFPKRGQTCVVHYTGMLEDGKKVDSSRDRNKPFKFMLGKQEVIRGWEEGVAQMSVGQRAKLTISPDYAYGATGHPGIIPPHATLVFDVELLKPETTTPAPRPPTPAPTIASQPLSLRPEACRPAAGGAVHTRGLDFACDIYIWAPLAGTCGVLLLSLVITLYCKRGRKKLLYIFKQPFMRPVQTTQEEDGCSCRFPEEEEGGCELRVKFSRSADAPAYKQGQNQLYNELNLGRREEYDVLDKRRGRDPEMGGKPRRKNPQEGLYNELQKDKMAEAYSEIGMKGERRRGKGHDGLYQGLSTATKDTYDALHMQALPPR

SEQ ID NO: 477 - protein, 644 aa, Artificial Sequence
  Description of Artificial Sequence: Synthetic Construct
MALPVTALLLPLALLLHAARPDIQMTQTTSSLSASLGDRVTISCRASQDISKYLNWYQQKPDGTVKLLIYHTSRLHSGVPSRFSGSGSGTDYSLTISNLEQEDIATYFCQQGNTLPYTFGGGTKLEITGGGGSGGGGSGGGGSEVKLQESGPGLVAPSQSLSVTCTVSGVSLPDYGVSWIRQPPRKGLEWLGVIWGSETTYYNSALKSRLTIIKDNSKSQVFLKMNSLQTDDTAIYYCAKHYYYGGSYAMDYWGQGTSVTVSSISLIAALAVDYVIGMENAMPWNLPADLAWFKRNTLNKPVIMGRHTWESIGRPLPGRKNIILSSQPGTDDRVTWVKSVDEAIAACGDVPEIMVIGGGRVIEQFLPKAQKLYLTHIDAEVEGDTHFPDYEPDDWESVFSEFHDADAQNSHSYCFEILERRTTTPAPRPPTPAPTIASQPLSLRPEACRPAAGGAVHTRGLDFACDIYIWAPLAGTCGVLLLSLVITLYCKRGRKKLLYIFKQPFMRPVQTTQEEDGCSCRFPEEEEGGCELRVKFSRSADAPAYKQGQNQLYNELNLGRREEYDVLDKRRGRDPEMGGKPRRKNPQEGLYNELQKDKMAEAYSEIGMKGERRRGKGHDGLYQGLSTATKDTYDALHMQALPPR

SEQ ID NO: 478 - protein, 593 aa, Artificial Sequence
  Description of Artificial Sequence: Synthetic Construct
MALPVTALLLPLALLLHAARPDIQMTQTTSSLSASLGDRVTISCRASQDISKYLNWYQQKPDGTVKLLIYHTSRLHSGVPSRFSGSGSGTDYSLTISNLEQEDIATYFCQQGNTLPYTFGGGTKLEITGGGGSGGGGSGGGGSEVKLQESGPGLVAPSQSLSVTCTVSGVSLPDYGVSWIRQPPRKGLEWLGVIWGSETTYYNSALKSRLTIIKDNSKSQVFLKMNSLQTDDTAIYYCAKHYYYGGSYAMDYWGQGTSVTVSSTTTPAPRPPTPAPTIASQPLSLRPEACRPAAGGAVHTRGLDFACDGVQVETISPGDGRTFPKRGQTCVVHYTGMLEDGKKVDSSRDRNKPFKFMLGKQEVIRGWEEGVAQMSVGQRAKLTISPDYAYGATGHPGIIPPHATLVFDVELLKPEIYIWAPLAGTCGVLLLSLVITLYCKRGRKKLLYIFKQPFMRPVQTTQEEDGCSCRFPEEEEGGCELRVKFSRSADAPAYKQGQNQLYNELNLGRREEYDVLDKRRGRDPEMGGKPRRKNPQEGLYNELQKDKMAEAYSEIGMKGERRRGKGHDGLYQGLSTATKDTYDALHMQALPPR

SEQ ID NO: 479 - protein, 644 aa, Artificial Sequence
  Description of Artificial Sequence: Synthetic Construct
MALPVTALLLPLALLLHAARPDIQMTQTTSSLSASLGDRVTISCRASQDISKYLNWYQQKPDGTVKLLIYHTSRLHSGVPSRFSGSGSGTDYSLTISNLEQEDIATYFCQQGNTLPYTFGGGTKLEITGGGGSGGGGSGGGGSEVKLQESGPGLVAPSQSLSVTCTVSGVSLPDYGVSWIRQPPRKGLEWLGVIWGSETTYYNSALKSRLTIIKDNSKSQVFLKMNSLQTDDTAIYYCAKHYYYGGSYAMDYWGQGTSVTVSSTTTPAPRPPTPAPTIASQPLSLRPEACRPAAGGAVHTRGLDFACDISLIAALAVDYVIGMENAMPWNLPADLAWFKRNTLNKPVIMGRHTWESIGRPLPGRKNIILSSQPGTDDRVTWVKSVDEAIAACGDVPEIMVIGGGRVIEQFLPKAQKLYLTHIDAEVEGDTHFPDYEPDDWESVFSEFHDADAQNSHSYCFEILERRIYIWAPLAGTCGVLLLSLVITLYCKRGRKKLLYIFKQPFMRPVQTTQEEDGCSCRFPEEEEGGCELRVKFSRSADAPAYKQGQNQLYNELNLGRREEYDVLDKRRGRDPEMGGKPRRKNPQEGLYNELQKDKMAEAYSEIGMKGERRRGKGHDGLYQGLSTATKDTYDALHMQALPPR

SEQ ID NO: 480 - protein, 649 aa, Artificial Sequence
  Description of Artificial Sequence: Synthetic Construct
MALPVTALLLPLALLLHAARPDIQMTQTTSSLSASLGDRVTISCRASQDISKYLNWYQQKPDGTVKLLIYHTSRLHSGVPSRFSGSGSGTDYSLTISNLEQEDIATYFCQQGNTLPYTFGGGTKLEITGGGGSGGGGSGGGGSEVKLQESGPGLVAPSQSLSVTCTVSGVSLPDYGVSWIRQPPRKGLEWLGVIWGSETTYYNSALKSRLTIIKDNSKSQVFLKMNSLQTDDTAIYYCAKHYYYGGSYAMDYWGQGTSVTVSSTTTPAPRPPTPAPTIASQPLSLRPEACRPAAGGAVHTRGLDFACDIYIWAPLAGTCGVLLLSLVITLYCKRGRKKLLYIFKQPFMRPVQTTQEEDGCSCRFPEEEEGGCELRVKFSRSADAPAYKQGQNQLYNELNLGRREEYDVLDKRRGRDPEMGGKPRRKNPQEGLYNELQKDKMAEAYSEIGMKGERRRGKGHDGLYQGLSTATKDTYDALHMQALPPRGGSGGISLIAALAVDHVIGMENAMPWNLPADLAWFKRNTLNKPVIMGRHTWESIGRPLPGRKNIILSSQPGTDDRVTWVKSVDEAIAACGDVPEIMVIGGGRVYEQFLPKAQKLYLTHIDAEVEGDTHFPDYKPDDWESVFSEFHDADAQNSHSYCFEILERR

SEQ ID NO: 481 - protein, 598 aa, Artificial Sequence
  Description of Artificial Sequence: Synthetic Construct
MALPVTALLLPLALLLHAARPDIQMTQTTSSLSASLGDRVTISCRASQDISKYLNWYQQKPDGTVKLLIYHTSRLHSGVPSRFSGSGSGTDYSLTISNLEQEDIATYFCQQGNTLPYTFGGGTKLEITGGGGSGGGGSGGGGSEVKLQESGPGLVAPSQSLSVTCTVSGVSLPDYGVSWIRQPPRKGLEWLGVIWGSETTYYNSALKSRLTIIKDNSKSQVFLKMNSLQTDDTAIYYCAKHYYYGGSYAMDYWGQGTSVTVSSTTTPAPRPPTPAPTIASQPLSLRPEACRPAAGGAVHTRGLDFACDIYIWAPLAGTCGVLLLSLVITLYCKRGRKKLLYIFKQPFMRPVQTTQEEDGCSCRFPEEEEGGCELRVKFSRSADAPAYKQGQNQLYNELNLGRREEYDVLDKRRGRDPEMGGKPRRKNPQEGLYNELQKDKMAEAYSEIGMKGERRRGKGHDGLYQGLSTATKDTYDALHMQALPPRGGSGGGVQVETISPGDGRTFPKRGQTCVVHYTGMLGDGKKVDSSRDRNKPFKFMLGKQEVIRGWEEGVAQMSVGQGAKLTISPDYAYGATGHPGIIPPHATLVFDVELLELE

SEQ ID NO: 482 - protein, 677 aa, Artificial Sequence
  Description of Artificial Sequence: Synthetic Construct
MALPVTALLLPLALLLHAARPDIQMTQTTSSLSASLGDRVTISCRASQDISKYLNWYQQKPDGTVKLLIYHTSRLHSGVPSRFSGSGSGTDYSLTISNLEQEDIATYFCQQGNTLPYTFGGGTKLEITGGGGSGGGGSGGGGSEVKLQESGPGLVAPSQSLSVTCTVSGVSLPDYGVSWIRQPPRKGLEWLGVIWGSETTYYNSALKSRLTIIKDNSKSQVFLKMNSLQTDDTAIYYCAKHYYYGGSYAMDYWGQGTSVTVSSTTTPAPRPPTPAPTIASQPLSLRPEACRPAAGGAVHTRGLDFACDIYIWAPLAGTCGVLLLSLVITLYCKRGRKKLLYIFKQPFMRPVQTTQEEDGCSCRFPEEEEGGCELRVKFSRSADAPAYKQGQNQLYNELNLGRREEYDVLDKRRGRDPEMGGKPRRKNPQEGLYNELQKDKMAEAYSEIGMKGERRRGKGHDGLYQGLSTATKDTYDALHMQALPPRGGSGGVGSLNCIVAVSQNMGIGKNGDLPWPPLRNEFRYFQRMTTTSSVEGKQNLVIMGKKTWFSIPEKNRPLKGRINLVLSRELKEPPQGAHFLSRSLDDALKLTEQPELANKVDMVWIVGGSSVIKEAMNHPGHLKLFVTRIMQDFESDTFFPEIDLEKYKLLPEYPGVLSDVQEEKGIKYKFEVYEKND

SEQ ID NO: 483 - protein, 677 aa, Artificial Sequence
  Description of Artificial Sequence: Synthetic Construct
MALPVTALLLPLALLLHAARPDIQMTQTTSSLSASLGDRVTISCRASQDISKYLNWYQQKPDGTVKLLIYHTSRLHSGVPSRFSGSGSGTDYSLTISNLEQEDIATYFCQQGNTLPYTFGGGTKLEITGGGGSGGGGSGGGGSEVKLQESGPGLVAPSQSLSVTCTVSGVSLPDYGVSWIRQPPRKGLEWLGVIWGSETTYYNSALKSRLTIIKDNSKSQVFLKMNSLQTDDTAIYYCAKHYYYGGSYAMDYWGQGTSVTVSSTTTPAPRPPTPAPTIASQPLSLRPEACRPAAGGAVHTRGLDFACDIYIWAPLAGTCGVLLLSLVITLYCKRGRKKLLYIFKQPFMRPVQTTQEEDGCSCRFPEEEEGGCELRVKFSRSADAPAYKQGQNQLYNELNLGRREEYDVLDKRRGRDPEMGGKPRRKNPQEGLYNELQKDKMAEAYSEIGMKGERRRGKGHDGLYQGLSTATKDTYDALHMQALPPRGGSGGVGSLNCIVAVSQNMGIGKNGDLPWPPLRNEFRYFQRMTTTSSVEGKQNLVIMGKKTWFSIPEKNRPLKGRINLVLSRELKEPPQGAHFLSRSLDDALKLTEQPELANKVDMVWIVGGSSVIKEFMNHPGHLKLFVTRIMQDFESDTFFPEIDLEKYKLLPEYPGVLSDVQEEKGIKYKFEVYEKND

SEQ ID NO: 484 - protein, 677 aa, Artificial Sequence
  Description of Artificial Sequence: Synthetic Construct
MALPVTALLLPLALLLHAARPDIQMTQTTSSLSASLGDRVTISCRASQDISKYLNWYQQKPDGTVKLLIYHTSRLHSGVPSRFSGSGSGTDYSLTISNLEQEDIATYFCQQGNTLPYTFGGGTKLEITGGGGSGGGGSGGGGSEVKLQESGPGLVAPSQSLSVTCTVSGVSLPDYGVSWIRQPPRKGLEWLGVIWGSETTYYNSALKSRLTIIKDNSKSQVFLKMNSLQTDDTAIYYCAKHYYYGGSYAMDYWGQGTSVTVSSTTTPAPRPPTPAPTIASQPLSLRPEACRPAAGGAVHTRGLDFACDIYIWAPLAGTCGVLLLSLVITLYCKRGRKKLLYIFKQPFMRPVQTTQEEDGCSCRFPEEEEGGCELRVKFSRSADAPAYKQGQNQLYNELNLGRREEYDVLDKRRGRDPEMGGKPRRKNPQEGLYNELQKDKMAEAYSEIGMKGERRRGKGHDGLYQGLSTATKDTYDALHMQALPPRGGSGGVGSLNCIVAVSQNMGIGKNGDLPWPPLRNEFRYFKRMTTTSSVEGKQNLVIMGKKTWFSIPEKNRPLKGRINLVLSRELKEPPQGAHFLSRSLDDALKLTEQPELANKVDMVWIVGGSSVIKEAMNHPGHLKLFVTRIMQDFESDTFFPEIDLEKYKLLPEYPGVLSDVQEEKGIKYKFEVYEKND

SEQ ID NO: 485 - protein, 677 aa, Artificial Sequence
  Description of Artificial Sequence: Synthetic Construct
MALPVTALLLPLALLLHAARPDIQMTQTTSSLSASLGDRVTISCRASQDISKYLNWYQQKPDGTVKLLIYHTSRLHSGVPSRFSGSGSGTDYSLTISNLEQEDIATYFCQQGNTLPYTFGGGTKLEITGGGGSGGGGSGGGGSEVKLQESGPGLVAPSQSLSVTCTVSGVSLPDYGVSWIRQPPRKGLEWLGVIWGSETTYYNSALKSRLTIIKDNSKSQVFLKMNSLQTDDTAIYYCAKHYYYGGSYAMDYWGQGTSVTVSSTTTPAPRPPTPAPTIASQPLSLRPEACRPAAGGAVHTRGLDFACDIYIWAPLAGTCGVLLLSLVITLYCKRGRKKLLYIFKQPFMRPVQTTQEEDGCSCRFPEEEEGGCELRVKFSRSADAPAYKQGQNQLYNELNLGRREEYDVLDKRRGRDPEMGGKPRRKNPQEGLYNELQKDKMAEAYSEIGMKGERRRGKGHDGLYQGLSTATKDTYDALHMQALPPRGGSGGVGSLNCIVAVSQNMGIGKNGDLPWPPLRNEFRYFFRMTTTSSVEGKQNLVIMGKKTWFSIPEKFRPLKGRINLVLSRELKEPPQGAHFLSRSLDDALKLTEQPELANKVDMVWIVGGSSVIKEAMNHPGHLKLFVTRIMQDFESDTFFPEIDLEKYKLLPEYPGVLSDVQEEKGIKYKFEVYEKND

SEQ ID NO: 486 - protein, 607 aa, Artificial Sequence
  Description of Artificial Sequence: Synthetic Construct
MALPVTALLLPLALLLHAARPSGGVQVETISPGDGRTFPKRGQTCVVHYTGMLEDGKKVDSSRDRNKPFKFMLGKQEVIRGWEEGVAQMSVGQRAKLTISPDYAYGATGHPGIIPPHATLVFDVELLKPEESRRVRRNKRSKDIQMTQTTSSLSASLGDRVTISCRASQDISKYLNWYQQKPDGTVKLLIYHTSRLHSGVPSRFSGSGSGTDYSLTISNLEQEDIATYFCQQGNTLPYTFGGGTKLEITGGGGSGGGGSGGGGSEVKLQESGPGLVAPSQSLSVTCTVSGVSLPDYGVSWIRQPPRKGLEWLGVIWGSETTYYNSALKSRLTIIKDNSKSQVFLKMNSLQTDDTAIYYCAKHYYYGGSYAMDYWGQGTSVTVSSTTTPAPRPPTPAPTIASQPLSLRPEACRPAAGGAVHTRGLDFACDIYIWAPLAGTCGVLLLSLVITLYCKRGRKKLLYIFKQPFMRPVQTTQEEDGCSCRFPEEEEGGCELRVKFSRSADAPAYKQGQNQLYNELNLGRREEYDVLDKRRGRDPEMGGKPRRKNPQEGLYNELQKDKMAEAYSEIGMKGERRRGKGHDGLYQGLSTATKDTYDALHMQALPPR

SEQ ID NO: 487 - protein, 658 aa, Artificial Sequence
  Description of Artificial Sequence: Synthetic Construct
MALPVTALLLPLALLLHAARPSGISLIAALAVDYVIGMENAMPWNLPADLAWFKRNTLNKPVIMGRHTWESIGRPLPGRKNIILSSQPGTDDRVTWVKSVDEAIAACGDVPEIMVIGGGRVIEQFLPKAQKLYLTHIDAEVEGDTHFPDYEPDDWESVFSEFHDADAQNSHSYCFEILERRESRRVRRNKRSKDIQMTQTTSSLSASLGDRVTISCRASQDISKYLNWYQQKPDGTVKLLIYHTSRLHSGVPSRFSGSGSGTDYSLTISNLEQEDIATYFCQQGNTLPYTFGGGTKLEITGGGGSGGGGSGGGGSEVKLQESGPGLVAPSQSLSVTCTVSGVSLPDYGVSWIRQPPRKGLEWLGVIWGSETTYYNSALKSRLTIIKDNSKSQVFLKMNSLQTDDTAIYYCAKHYYYGGSYAMDYWGQGTSVTVSSTTTPAPRPPTPAPTIASQPLSLRPEACRPAAGGAVHTRGLDFACDIYIWAPLAGTCGVLLLSLVITLYCKRGRKKLLYIFKQPFMRPVQTTQEEDGCSCRFPEEEEGGCELRVKFSRSADAPAYKQGQNQLYNELNLGRREEYDVLDKRRGRDPEMGGKPRRKNPQEGLYNELQKDKMAEAYSEIGMKGERRRGKGHDGLYQGLSTATKDTYDALHMQALPPR

SEQ ID NO: 488 - protein, 686 aa, Artificial Sequence
  Description of Artificial Sequence: Synthetic Construct
MALPVTALLLPLALLLHAARPSGVGSLNCIVAVSQNMGIGKNGDLPWPPLRNEFRYFQRMTTTSSVEGKQNLVIMGKKTWFSIPEKNRPLKGRINLVLSRELKEPPQGAHFLSRSLDDALKLTEQPELANKVDMVWIVGGSSVIKEFMNHPGHLKLFVTRIMQDFESDTFFPEIDLEKYKLLPEYPGVLSDVQEEKGIKYKFEVYEKNDESRRVRRNKRSKDIQMTQTTSSLSASLGDRVTISCRASQDISKYLNWYQQKPDGTVKLLIYHTSRLHSGVPSRFSGSGSGTDYSLTISNLEQEDIATYFCQQGNTLPYTFGGGTKLEITGGGGSGGGGSGGGGSEVKLQESGPGLVAPSQSLSVTCTVSGVSLPDYGVSWIRQPPRKGLEWLGVIWGSETTYYNSALKSRLTIIKDNSKSQVFLKMNSLQTDDTAIYYCAKHYYYGGSYAMDYWGQGTSVTVSSTTTPAPRPPTPAPTIASQPLSLRPEACRPAAGGAVHTRGLDFACDIYIWAPLAGTCGVLLLSLVITLYCKRGRKKLLYIFKQPFMRPVQTTQEEDGCSCRFPEEEEGGCELRVKFSRSADAPAYKQGQNQLYNELNLGRREEYDVLDKRRGRDPEMGGKPRRKNPQEGLYNELQKDKMAEAYSEIGMKGERRRGKGHDGLYQGLSTATKDTYDALHMQALPPR

SEQ ID NO: 489 - protein, 686 aa, Artificial Sequence
  Description of Artificial Sequence: Synthetic Construct
MALPVTALLLPLALLLHAARPSGVGSLNCIVAVSQNMGIGKNGDLPWPPLRNEFRYFKRMTTTSSVEGKQNLVIMGKKTWFSIPEKNRPLKGRINLVLSRELKEPPQGAHFLSRSLDDALKLTEQPELANKVDMVWIVGGSSVIKEAMNHPGHLKLFVTRIMQDFESDTFFPEIDLEKYKLLPEYPGVLSDVQEEKGIKYKFEVYEKNDESRRVRRNKRSKDIQMTQTTSSLSASLGDRVTISCRASQDISKYLNWYQQKPDGTVKLLIYHTSRLHSGVPSRFSGSGSGTDYSLTISNLEQEDIATYFCQQGNTLPYTFGGGTKLEITGGGGSGGGGSGGGGSEVKLQESGPGLVAPSQSLSVTCTVSGVSLPDYGVSWIRQPPRKGLEWLGVIWGSETTYYNSALKSRLTIIKDNSKSQVFLKMNSLQTDDTAIYYCAKHYYYGGSYAMDYWGQGTSVTVSSTTTPAPRPPTPAPTIASQPLSLRPEACRPAAGGAVHTRGLDFACDIYIWAPLAGTCGVLLLSLVITLYCKRGRKKLLYIFKQPFMRPVQTTQEEDGCSCRFPEEEEGGCELRVKFSRSADAPAYKQGQNQLYNELNLGRREEYDVLDKRRGRDPEMGGKPRRKNPQEGLYNELQKDKMAEAYSEIGMKGERRRGKGHDGLYQGLSTATKDTYDALHMQALPPR

SEQ ID NO: 490 - DNA, 726 bp, Artificial Sequence
  Description of Artificial Sequence: Synthetic CD19 scFv sequence
gacatccagatgacacagaccacaagctccctgtccgcctctctgggcgacagagtgaccatcagctgccgggcctcccaggatatctctaagtatctgaactggtaccagcagaagcccgatggcacagtgaagctgctgatctatcacaccagccgcctgcactccggagtgccttctaggttcagcggctccggctctggcacagactacagcctgaccatctccaacctggagcaggaggatatcgccacctatttctgccagcagggcaatacactgccttacacctttggcggcggcacaaagctggagatcaccggaggaggaggcagcggaggaggaggctccggcggcggcggctctgaggtgaagctgcaggagtccggaccaggcctggtggcacctagccagtccctgtctgtgacatgtaccgtgtccggcgtgtctctgccagactacggcgtgtcttggatcaggcagccacctaggaagggcctggagtggctgggcgtgatctggggcagcgagacaacatactataattctgccctgaagagcagactgacaatcatcaaggacaacagcaagtcccaggtgttcctgaagatgaatagcctgcagacagacgataccgccatctactattgcgccaagcactactattacggcggcagctatgccatggattactggggccagggcacatccgtgaccgtgtctagc

SEQ ID NO: 491 - DNA, 726 bp, Artificial Sequence
  Description of Artificial Sequence: Synthetic CD19 scFv sequence
gacatccagatgacacagaccacaagctccctgagcgcctccctgggcgacagagtgaccatctcttgccgggccagccaggatatctccaagtatctgaactggtaccagcagaagcccgatggcacagtgaagctgctgatctatcacacctctcgcctgcacagcggcgtgccttccaggttctctggcagcggctccggcacagactactctctgaccatcagcaacctggagcaggaggatatcgccacctatttctgccagcagggcaatacactgccctacacctttggcggcggcacaaagctggagatcaccggcggcggcggctctggaggaggaggcagcggcggaggaggctccgaggtgaagctgcaggagtccggaccaggcctggtggcaccatctcagagcctgtccgtgacatgtaccgtgagcggcgtgtccctgcctgactacggcgtgagctggatcagacagccacctaggaagggcctggagtggctgggcgtgatctggggctccgagacaacatactataactccgccctgaagtctcggctgaccatcatcaaggacaactctaagagccaggtgttcctgaagatgaattccctgcagacagacgataccgccatctactattgcgccaagcactactattacggcggctcctatgccatggattactggggccagggcacatctgtgaccgtgtctagc

SEQ ID NO: 492 - DNA, 726 bp, Artificial Sequence
  Description of Artificial Sequence: Synthetic CD19 scFv sequence
gacatccagatgacacagaccacaagctccctgagcgcctccctgggcgacagagtgaccatcagctgccgggcctcccaggatatctctaagtatctgaactggtaccagcagaagccagatggcacagtgaagctgctgatctatcacaccagccgcctgcactccggagtgccctctaggttctctggcagcggctccggcacagactacagcctgaccatctccaacctggagcaggaggatatcgccacctatttctgccagcagggcaatacactgccatacacctttggcggcggcacaaagctggagatcaccggaggaggaggcagcggaggaggaggctccggcggcggcggctctgaggtgaagctgcaggagtccggaccaggcctggtggcaccttctcagagcctgtccgtgacatgtaccgtgtctggcgtgagcctgcccgactacggcgtgtcttggatcagacagccacctaggaagggcctggagtggctgggcgtgatctggggcagcgagacaacatactataattctgccctgaagagcaggctgaccatcatcaaggacaactctaagagccaggtgttcctgaagatgaattccctgcagacagacgataccgccatctactattgcgccaagcactactattacggcggctcttatgccatggattactggggccagggcacaagcgtgaccgtgtctagc

SEQ ID NO: 493 - DNA, 726 bp, Artificial Sequence
  Description of Artificial Sequence: Synthetic CD19 scFv sequence
gacatccagatgacacagaccacaagctccctgagcgcctccctgggcgacagagtgaccatctcttgccgggccagccaggatatctccaagtatctgaactggtaccagcagaagccagatggcacagtgaagctgctgatctatcacacctctcgcctgcacagcggagtgccctccaggttctctggcagcggctccggcacagactactctctgaccatcagcaacctggagcaggaggatatcgccacctatttctgccagcagggcaatacactgccctacacctttggcggcggcacaaagctggagatcaccggcggcggcggctctggaggaggaggcagcggcggaggaggctccgaggtgaagctgcaggagtccggaccaggcctggtggcaccatctcagagcctgtccgtgacatgtaccgtgagcggcgtgtccctgcctgactacggcgtgagctggatcagacagccacctaggaagggcctggagtggctgggcgtgatctggggctccgagacaacatactataattccgccctgaagtctcggctgacaatcatcaaggacaactctaagagccaggtgtttctgaagatgaatagcctgcagacagacgataccgccatctactattgcgccaagcactactattacggcggctcctatgccatggattactggggccagggcacatctgtgaccgtgtctagc

SEQ ID NO: 494 - DNA, 726 bp, Artificial Sequence
  Description of Artificial Sequence: Synthetic CD19 scFv sequence
gacatccagatgacacagaccacaagctccctgagcgcctccctgggcgacagagtgaccatcagctgccgggcctcccaggatatctctaagtatctgaactggtaccagcagaagccagatggcacagtgaagctgctgatctatcacaccagccgcctgcactccggagtgccctctaggttctctggcagcggctccggcacagactacagcctgaccatctccaacctggagcaggaggatatcgccacctatttctgccagcagggcaatacactgccatacacctttggcggcggcacaaagctggagatcaccggaggaggaggcagcggaggaggaggctccggcggcggcggctctgaggtgaagctgcaggagtccggaccaggcctggtggcaccttctcagagcctgtccgtgacatgtaccgtgtctggcgtgagcctgcccgactacggcgtgtcttggatcagacagccacctaggaagggcctggagtggctgggcgtgatctggggcagcgagacaacatactataattctgccctgaagagcaggctgacaatcatcaaggacaactctaagagccaggtgtttctgaagatgaatagcctgcagacagacgataccgccatctactattgtgccaagcactactattacggcggcagctatgccatggattactggggccagggcacatccgtgaccgtgtctagc

SEQ ID NO: 495 - DNA, 207 bp, Homo sapiens
accacgacgccagcgccgcgaccaccaacaccggcgcccaccatcgcgtcgcagcccctgtccctgcgcccagaggcgtgccggccagcggcggggggcgcagtgcacacgagggggctggacttcgcctgtgatatctacatctgggcgcccttggccgggacttgtggggtccttctcctgtcactggttatcactttactgccc

SEQ ID NO: 496 - DNA, 135 bp, Artificial Sequence
  Description of Artificial Sequence: Synthetic Construct
accacaaccccagcacctcgcccaccaacaccagcaccaaccatcgcatcccagccactgtctctgaggcccgaggcatgtaggcctgcagcaggaggcgccgtgcacaccaggggcctggactttgcctgcgat

SEQ ID NO: 497 - DNA, 135 bp, Artificial Sequence
  Description of Artificial Sequence: Synthetic Construct
acaacaaccccagcacccagacctccaacacctgcaccaaccatcgcaagccagcctctgtccctgaggcccgaggcatgtaggccagcagcaggaggcgccgtgcacacccggggcctggactttgcctgcgat

SEQ ID NO: 498 - DNA, 135 bp, Artificial Sequence
  Description of Artificial Sequence: Synthetic Construct
accacaaccccagcaccccgcccaccaacacctgcaccaaccatcgcctcccagccactgtctctgaggcccgaggcatgtaggcctgcagcaggaggcgccgtgcacaccaggggcctggactttgcctgcgat

SEQ ID NO: 499 - DNA, 135 bp, Artificial Sequence
  Description of Artificial Sequence: Synthetic Construct
accacaaccccagcacccagaccaccaacacctgcaccaaccatcgcaagccagcctctgtccctgcgcccagaggcatgcaggccagcagcaggaggagcagtgcacacccggggcctggacttcgcatgtgat

SEQ ID NO: 500 - DNA, 135 bp, Artificial Sequence
  Description of Artificial Sequence: Synthetic Construct
accacaaccccagcacctcgcccaccaacaccagcaccaaccatcgcatcccagccactgtctctgcgccccgaggcatgcaggcctgcagcaggcggcgccgtgcacaccaggggcctggacttcgcctgtgat

SEQ ID NO: 501 - DNA, 336 bp, Artificial Sequence
  Description of Artificial Sequence: Synthetic Construct
agggtgaagttttctaggagcgccgatgcaccagcatataagcagggacagaaccagctgtacaacgagctgaatctgggcaggagagaggagtacgacgtgctggataagaggaggggaagggaccccgagatgggaggcaagccaaggagaaagaacccccaggagggcctgtataatgagctgcagaaggacaagatggccgaggcctactccgagatcggcatgaagggagagcggcgcaggggcaagggacacgatggcctgtatcagggcctgtctacagccaccaaggacacctacgatgcactgcacatgcaggccctgcctccaagg

SEQ ID NO: 502 - DNA, 336 bp, Artificial Sequence
  Description of Artificial Sequence: Synthetic Construct
agggtgaagttttccaggtctgccgatgcccccgcctataagcagggccagaatcagctgtacaacgagctgaatctgggcaggagagaggagtacgacgtgctggataagaggaggggacgcgaccccgagatgggaggcaagcctaggagaaagaacccacaggagggcctgtataatgagctgcagaaggacaagatggccgaggcctactctgagatcggcatgaagggagagcggcgcaggggcaagggacacgatggcctgtatcagggcctgagcacagccaccaaggacacctacgatgcactgcacatgcaggccctgccacctagg

SEQ ID NO: 503 - DNA, 336 bp, Artificial Sequence
  Description of Artificial Sequence: Synthetic Construct
agggtgaagtttagcaggtccgccgatgccccagcctataagcagggccagaaccagctgtacaacgagctgaatctgggcaggagggaagagtacgacgtgctggataagaggagaggaagggaccccgagatgggaggcaagccaaggaggaagaacccacaggagggcctgtataatgagctgcagaaggacaagatggccgaggcctacagcgagatcggcatgaagggagagaggagacggggcaagggacacgatggcctgtatcagggcctgtccacagccaccaaggacacctacgatgcactgcacatgcaggccctgcctccaagg

SEQ ID NO: 504 - DNA, 336 bp, Artificial Sequence
  Description of Artificial Sequence: Synthetic Construct
agggtgaagttttccaggtctgccgatgccccagcctataagcagggccagaatcagctgtacaacgagctgaatctgggcaggagagaggagtacgacgtgctggataagaggaggggacgcgaccccgagatgggaggcaagcctaggagaaagaacccacaggagggcctgtataatgagctgcagaaggacaagatggccgaggcctactctgagatcggcatgaagggagagcggcgcaggggcaagggacacgatggcctgtatcagggcctgagcacagccaccaaggacacctacgatgcactgcacatgcaggccctgccacctagg

SEQ ID NO: 505 - DNA, 336 bp, Artificial Sequence
  Description of Artificial Sequence: Synthetic Construct
agggtgaagtttagcaggtccgccgatgccccagcctataagcagggccagaaccagctgtacaacgagctgaatctgggcaggagggaagagtacgacgtgctggataagaggagaggaagggaccccgagatgggaggcaagccaaggaggaagaacccacaggagggcctgtataatgagctgcagaaggacaagatggccgaggcctactccgagatcggcatgaagggagagaggagacggggcaagggacacgatggcctgtatcagggcctgtctacagccaccaaggacacctacgatgcactgcacatgcaggccctgcctccaagg

SEQ ID NO: 506 - DNA, 126 bp, Artificial Sequence
  Description of Artificial Sequence: Synthetic Construct
aagagaggccggaagaagctgctgtacatcttcaagcagcccttcatgaggcccgtgcagacaacccaggaggaggacggctgcagctgtcggttcccagaggaggaggagggaggatgtgagctg

SEQ ID NO: 507 - DNA, 126 bp, Artificial Sequence
  Description of Artificial Sequence: Synthetic Construct
aagcgcggcaggaagaagctgctgtacatcttcaagcagccctttatgcgccctgtgcagacaacccaggaggaggacggctgcagctgtaggttcccagaggaggaggagggaggatgtgagctg

SEQ ID NO: 508 - DNA, 126 bp, Artificial Sequence
  Description of Artificial Sequence: Synthetic Construct
aagcgcggcaggaagaagctgctgtacatcttcaagcagccttttatgcgcccagtgcagacaacccaggaggaggacggctgcagctgtaggttccctgaggaggaggagggaggatgtgagctg

SEQ ID NO: 509 - DNA, 126 bp, Artificial Sequence
  Description of Artificial Sequence: Synthetic Construct
aagcgcggcaggaagaagctgctgtacatcttcaagcagccctttatgcgccctgtgcagacaacccaggaggaggacggctgcagctgtaggttccctgaggaggaggagggaggatgtgagctg

SEQ ID NO: 510 - DNA, 126 bp, Artificial Sequence
  Description of Artificial Sequence: Synthetic Construct
aagcgcggcaggaagaagctgctgtacatcttcaagcagccttttatgcgcccagtgcagacaacccaggaggaggacggctgcagctgtaggttccctgaggaggaggagggaggatgcgagctg

SEQ ID NO: 511 - DNA, 63 bp, Homo sapiens
atggccttaccagtgaccgccttgctcctgccgctggccttgctgctccacgccgccaggccg

SEQ ID NO: 512 - DNA, 63 bp, Artificial Sequence
  Description of Artificial Sequence: Synthetic Signal Sequence
atggcactgcctgtgaccgccctgctgctgccactggccctgctgctgcacgcagccaggccc

SEQ ID NO: 513 - DNA, 63 bp, Artificial Sequence
  Description of Artificial Sequence: Synthetic Signal Sequence
atggcactgccagtgacagccctgctgctgcctctggccctgctgctgcacgcagccagacct

SEQ ID NO: 514 - DNA, 63 bp, Artificial Sequence
  Description of Artificial Sequence: Synthetic Signal Sequence
atggcactgcctgtgacagccctgctgctgccactggccctgctgctgcacgcagcccgccct

SEQ ID NO: 515 - DNA, 63 bp, Artificial Sequence
  Description of Artificial Sequence: Synthetic Signal Sequence
atggcactgcctgtgaccgccctgctgctgccactggccctgctgctgcacgcagcccgccct

SEQ ID NO: 516 - DNA, 15 bp, Artificial Sequence
  Description of Artificial Sequence: Synthetic Linker
ggaggcagcggagga

SEQ ID NO: 517 - DNA, 15 bp, Artificial Sequence
  Description of Artificial Sequence: Synthetic Linker
ggaggctctggagga

SEQ ID NO: 518 - DNA, 15 bp, Artificial Sequence
  Description of Artificial Sequence: Synthetic Linker
ggaggctccggcgga

SEQ ID NO: 519 - DNA, 15 bp, Artificial Sequence
  Description of Artificial Sequence: Synthetic Linker
ggaggatccggaggc

SEQ ID NO: 520 - DNA, 15 bp, Artificial Sequence
  Description of Artificial Sequence: Synthetic Linker
ggaggatctggagga

SEQ ID NO: 521 - DNA, 36 bp, Artificial Sequence
  Description of Artificial Sequence: Synthetic Cleavage site
gagtctaggcgcgtgcggagaaataagcggagcaag

SEQ ID NO: 522 - DNA, 36 bp, Artificial Sequence
  Description of Artificial Sequence: Synthetic Cleavage site
gagtctcggagagtgaggcgcaataagaggagcaag

SEQ ID NO: 523 - DNA, 36 bp, Artificial Sequence
  Description of Artificial Sequence: Synthetic Cleavage site
gagtccaggagagtgcggcgcaacaagaggagcaag

SEQ ID NO: 524 - DNA, 321 bp, Artificial Sequence
  Description of Artificial Sequence: Synthetic Destabilizing Domain (DD)
ggagtgcaggtggagacaatctctcctggcgatggccggaccttcccaaagagaggccagacatgcgtggtgcactacaccggcatgctggaggacggcaagaaggtggacagctcccgggatagaaacaagccattcaagtttatgctgggcaagcaggaagtgatcaggggatgggaggagggagtggcacagatgtctgtgggccagagagccaagctgacaatcagccctgattacgcatatggagcaaccggacacccaggaatcatcccacctcacgccaccctggtgtttgatgtggagctgctgaagccagag

SEQ ID NO: 525 - DNA, 321 bp, Artificial Sequence
  Description of Artificial Sequence: Synthetic Destabilizing Domain (DD)
ggcgtgcaggtggagacaatctcccctggcgatggccggaccttcccaaagagaggccagacatgcgtggtgcactacaccggcatgctggaggacggcaagaaggtggacagctcccgggatagaaacaagcctttcaagtttatgctgggcaagcaggaagtgatcaggggatgggaggagggagtggcacagatgtctgtgggccagagagccaagctgacaatcagccctgattacgcatatggagcaaccggacacccaggaatcatcccacctcacgccaccctggtgtttgacgtggagctgctgaagccagag

SEQ ID NO: 526 - DNA, 321 bp, Artificial Sequence
  Description of Artificial Sequence: Synthetic Destabilizing Domain (DD)
ggagtgcaggtggagacaatctcccctggcgatggcaggaccttcccaaagcgcggccagacatgcgtggtgcactacaccggcatgctggaggacggcaagaaggtggacagctcccgggatagaaacaagccattcaagtttatgctgggcaagcaggaagtgatcaggggatgggaggagggagtggcacagatgtccgtgggacagcgcgccaagctgacaatctctcctgattacgcatatggagcaaccggacacccaggaatcatcccacctcacgccaccctggtgtttgacgtggagctgctgaagcccgag

SEQ ID NO: 527 - DNA, 474 bp, Artificial Sequence
  Description of Artificial Sequence: Synthetic Destabilizing Domain (DD)
atctctctgatcgccgccctggccgtggattacgtgatcggcatggagaacgccatgccatggaatctgccagcagacctggcatggttcaagaggaacacactgaataagccagtgatcatgggcagacacacctgggagtccatcggccggccactgccaggcagaaagaacatcatcctgagctcccagcccggcacagacgatagggtgacctgggtgaagagcgtggacgaggcaatcgcagcatgcggcgatgtgcctgagatcatggtcatcggaggaggacgcgtgatcgagcagttcctgccaaaggcccagaagctgtacctgacacacatcgatgccgaggtggagggcgacacccactttcctgattatgagccagacgattgggagtccgtgttctctgagtttcacgacgccgatgcccagaactctcacagctattgttttgagatcctggagcggaga

SEQ ID NO: 528 - DNA, 324 bp, Artificial Sequence
  Description of Artificial Sequence: Synthetic Destabilizing Domain (DD)
ggcgtgcaggtggagacaatcagccccggcgatggccggacctttcctaagagaggccagacatgcgtggtgcactacaccggcatgctgggcgacggcaagaaggtggacagctccagggatcgcaataagcccttcaagtttatgctgggcaagcaggaagtgatcaggggatgggaggagggagtggcacagatgtccgtgggacagggcgccaagctgacaatctctccagattacgcatatggagcaaccggacacccaggaatcatcccaccccacgccaccctggtgttcgacgtggagctgctggagctggagtga

SEQ ID NO: 529 - DNA, 324 bp, Artificial Sequence
  Description of Artificial Sequence: Synthetic Destabilizing Domain (DD)
ggagtgcaggtggagacaatcagccccggcgatggcaggacctttcctaagcgcggccagacatgcgtggtgcactacaccggcatgctgggcgacggcaagaaggtggacagctcccgggatagaaataagcccttcaagtttatgctgggcaagcaggaagtgatcagaggctgggaggagggagtggcacagatgtctgtgggacagggcgccaagctgacaatcagcccagattacgcatatggagcaaccggacacccaggaatcatcccaccccacgccaccctggtgttcgacgtggagctgctggagctggagtga

SEQ ID NO: 530 - DNA, 324 bp, Artificial Sequence
  Description of Artificial Sequence: Synthetic Destabilizing Domain (DD)
ggcgtgcaggtggagacaatcagccccggcgatggccggacctttcctaagcgcggccagacatgcgtggtgcactacaccggcatgctgggcgacggcaagaaggtggacagctccagggatagaaacaagccattcaagtttatgctgggcaagcaggaagtgatcagaggatgggaggagggagtggcacagatgtccgtgggacagggcgccaagctgacaatctctccagattacgcatatggagcaaccggacacccaggaatcatcccaccccacgccaccctggtgttcgacgtggagctgctggagctggagtga

SEQ ID NO: 531 - DNA, 324 bp, Artificial Sequence
  Description of Artificial Sequence: Synthetic Destabilizing Domain (DD)
ggagtgcaggtggagacaatcagcccaggcgacggaaggacattcccaaagaggggacagacctgcgtggtgcactacacaggcatgctgggcgatggcaagaaggtggacagctcccgggatagaaacaagcccttcaagtttatgctgggcaagcaggaagtgatcaggggatgggaggagggagtggcacagatgtccgtgggacagggcgccaagctgaccatctctcctgactacgcctatggagcaacaggacacccaggaatcatcccacctcacgccaccctggtgtttgatgtggagctgctggagctggagtga

SEQ ID NO: 532 - DNA, 474 bp, Artificial Sequence
  Description of Artificial Sequence: Synthetic Destabilizing Domain (DD)
atctccctgatcgccgccctggccgtggattatgtgatcggcatggagaacgccatgccctggaatctgcccgccgacctggcctggttcaagaggaataccctgaacaagcccgtcatcatgggcaggcacacctgggaaagcatcggcagacccctgcccggcaggaagaacatcatcctgtccagccagcccggcaccgacgacagagtgacctgggtgaagagcgtggacgaagctatcgccgcttgcggcgacgtgcccgagatcatggtgatcggcggcggcagggtgatcgaacagttcctgcccaaggcccagaagctgtacctgacccacatcgatgccgaggtggaaggcgatacacacttccccgattacgaacctgacgactgggaaagcgtgttttccgaattccacgacgccgacgcccagaacagccacagctactgcttcgagatcctggaaagaagg

SEQ ID NO: 533 - DNA, 561 bp, Artificial Sequence
  Description of Artificial Sequence: Synthetic Destabilizing Domain (DD)
atggttggttcgctaaactgcatcgtcgctgtgtcccagaacatgggcatcggcaagaacggggacctgccctggccaccgctcaggaatgaattcagatatttccagagaatgaccacaacctcttcagtagaaggtaaacagaatctggtgattatgggtaagaagacctggttctccattcctgagaagaatcgacctttaaagggtagaattaatttagttctcagcagagaactcaaggaacctccacaaggagctcattttctttccagaagtctagatgatgccttaaaacttactgaacaaccagaattagcaaataaagtagacatggtctggatagttggtggcagttctgttattaaggaagccatgaatcacccaggccatcttaaactatttgtgacaaggatcatgcaagactttgaaagtgacacgttttttccagaaattgatttggagaaatataaacttctgccagaatacccaggtgttctctctgatgtccaggaggagaaaggcattaagtacaaatttgaagtatatgagaagaatgat

SEQ ID NO: 534 - DNA, 558 bp, Artificial Sequence
  Description of Artificial Sequence: Synthetic Destabilizing Domain (DD)
gttggttcgctaaactgcatcgtcgctgtgtcccagaacatgggcatcggcaagaacggggacctgccctggccaccgctcaggaatgaattcagatatttccagagaatgaccacaacctcttcagtagaaggtaaacagaatctggtgattatgggtaagaagacctggttctccattcctgagaagaatcgacctttaaagggtagaattaatttagttctcagcagagaactcaaggaacctccacaaggagctcattttctttccagaagtctagatgatgccttaaaacttactgaacaaccagaattagcaaataaagtagacatggtctggatagttggtggcagttctgttattaaggaagccatgaatcacccaggccatcttaaactatttgtgacaaggatcatgcaagactttgaaagtgacacgttttttccagaaattgatttggagaaatataaacttctgccagaatacccaggtgttctctctgatgtccaggaggagaaaggcattaagtacaaatttgaagtatatgagaagaatgat

SEQ ID NO: 535 - DNA, 561 bp, Artificial Sequence
  Description of Artificial Sequence: Synthetic Destabilizing Domain (DD)
atggttggttcgctaaactgcatcgtcgctgtgtcccagaacatgggcatcggcaagaacggggacctgccctggccaccgctcaggaatgaattcagatatttccagagaatgaccacaacctcttcagtagaaggtaaacagaatctggtgattatgggtaagaagacctggttctccattcctgagaagaatcgacctttaaagggtagaattaatttagttctcagcagagaactcaaggaacctccacaaggagctcattttctttccagaagtctagatgatgccttaaaacttactgaacaaccagaattagcaaataaagtagacatggtctggatagttggtggcagttctgttattaaggaattcatgaatcacccaggccatcttaaactatttgtgacaaggatcatgcaagactttgaaagtgacacgttttttccagaaattgatttggagaaatataaacttctgccagaatacccaggtgttctctctgatgtccaggaggagaaaggcattaagtacaaatttgaagtatatgagaagaatgat

SEQ ID NO: 536 - DNA, 561 bp, Artificial Sequence
  Description of Artificial Sequence: Synthetic Destabilizing Domain (DD)
gtgggctccctgaactgcatcgtggccgtgagccagaacatgggcatcggcaagaatggcgacctgccttggccacctctgaggaacgagttcagatactttcagaggatgaccacaaccagctccgtggagggcaagcagaacctggtcatcatgggcaagaagacatggttctctatccccgagaagaaccgccctctgaagggccggatcaatctggtgctgagcagagagctgaaggagccaccacagggagcacacttcctgagccggagcctggacgatgccctgaagctgaccgagcagcccgagctggccaacaaggtggacatggtgtggatcgtgggcggctctagcgtgatcaaggagttcatgaatcacccaggccacctgaagctgttcgtgacaagaatcatgcaggactttgagtccgataccttctttcccgagatcgacctggagaagtacaagctgctgcctgagtatccaggcgtgctgtctgatgtgcaggaggagaagggcatcaagtacaagttcgaggtgtatgagaagaatgattga

SEQ ID NO: 537 - DNA, 561 bp, Artificial Sequence
  Description of Artificial Sequence: Synthetic Destabilizing Domain (DD)
atggttggttcgctaaactgcatcgtcgctgtgtcccagaacatgggcatcggcaagaacggggacctgccctggccaccgctcaggaatgaattcagatatttcaagagaatgaccacaacctcttcagtagaaggtaaacagaatctggtgattatgggtaagaagacctggttctccattcctgagaagaatcgacctttaaagggtagaattaatttagttctcagcagagaactcaaggaacctccacaaggagctcattttctttccagaagtctagatgatgccttaaaacttactgaacaaccagaattagcaaataaagtagacatggtctggatagttggtggcagttctgttattaaggaagccatgaatcacccaggccatcttaaactatttgtgacaaggatcatgcaagactttgaaagtgacacgttttttccagaaattgatttggagaaatataaacttctgccagaatacccaggtgttctctctgatgtccaggaggagaaaggcattaagtacaaatttgaagtatatgagaagaatgat

SEQ ID NO: 538 - DNA, 561 bp, Artificial Sequence
  Description of Artificial Sequence: Synthetic Destabilizing Domain (DD)
gtgggctccctgaactgcatcgtggccgtgagccagaacatgggcatcggcaagaatggcgacctgccttggccacctctgaggaacgagttcagatactttaagaggatgaccacaaccagctccgtggagggcaagcagaacctggtcatcatgggcaagaagacatggttctctatccccgagaagaaccgccctctgaagggccggatcaatctggtgctgagcagagagctgaaggagccaccacagggagcacacttcctgagccggagcctggacgatgccctgaagctgaccgagcagcccgagctggccaacaaggtggacatggtgtggatcgtgggcggctctagcgtgatcaaggaggccatgaatcacccaggccacctgaagctgttcgtgacaagaatcatgcaggactttgagtccgataccttctttcccgagatcgacctggagaagtacaagctgctgcctgagtatccaggcgtgctgtctgatgtgcaggaggagaagggcatcaagtacaagttcgaggtgtatgagaagaatgattga

SEQ ID NO: 539 - DNA, 561 bp, Artificial Sequence
  Description of Artificial Sequence: Synthetic Destabilizing Domain (DD)
atggttggttcgctaaactgcatcgtcgctgtgtcccagaacatgggcatcggcaagaacggggacctgccctggccaccgctcaggaatgaattcagatatttcaagagaatgaccacaacctcttcagtagaaggtaaacagaatctggtgattatgggtaagaagacctggttctccattcctgagaagttccgacctttaaagggtagaattaatttagttctcagcagagaactcaaggaacctccacaaggagctcattttctttccagaagtctagatgatgccttaaaacttactgaacaaccagaattagcaaataaagtagacatggtctggatagttggtggcagttctgttattaaggaagccatgaatcacccaggccatcttaaactatttgtgacaaggatcatgcaagactttgaaagtgacacgttttttccagaaattgatttggagaaatataaacttctgccagaatacccaggtgttctctctgatgtccaggaggagaaaggcattaagtacaaatttgaagtatatgagaagaatgat

SEQ ID NO: 540 - DNA, 561 bp, Artificial Sequence
  Description of Artificial Sequence: Synthetic Destabilizing Domain (DD)
gtgggctccctgaactgcatcgtggccgtgagccagaacatgggcatcggcaagaatggcgacctgccttggccacctctgaggaacgagttcagatactttttcaggatgaccacaaccagctccgtggagggcaagcagaacctggtcatcatgggcaagaagacatggttctctatccccgagaagttccgccctctgaagggccggatcaatctggtgctgagcagagagctgaaggagccaccacagggagcacacttcctgagccggagcctggacgatgccctgaagctgaccgagcagcccgagctggccaacaaggtggacatggtgtggatcgtgggcggctctagcgtgatcaaggaggccatgaatcacccaggccacctgaagctgttcgtgacaagaatcatgcaggactttgagtccgataccttctttcccgagatcgacctggagaagtacaagctgctgcctgagtatccaggcgtgctgtctgatgtgcaggaggagaagggcatcaagtacaagttcgaggtgtatgagaagaatgattga

SEQ ID NO: 541 - DNA, 1461 bp, Artificial Sequence
  Description of Artificial Sequence: Synthetic Construct
atggcactgcctgtgaccgccctgctgctgccactggccctgctgctgcacgcagccaggcccgacatccagatgacacagaccacaagctccctgtccgcctctctgggcgacagagtgaccatcagctgccgggcctcccaggatatctctaagtatctgaactggtaccagcagaagcccgatggcacagtgaagctgctgatctatcacaccagccgcctgcactccggagtgccttctaggttcagcggctccggctctggcacagactacagcctgaccatctccaacctggagcaggaggatatcgccacctatttctgccagcagggcaatacactgccttacacctttggcggcggcacaaagctggagatcaccggaggaggaggcagcggaggaggaggctccggcggcggcggctctgaggtgaagctgcaggagtccggaccaggcctggtggcacctagccagtccctgtctgtgacatgtaccgtgtccggcgtgtctctgccagactacggcgtgtcttggatcaggcagccacctaggaagggcctggagtggctgggcgtgatctggggcagcgagacaacatactataattctgccctgaagagcagactgacaatcatcaaggacaacagcaagtcccaggtgttcctgaagatgaatagcctgcagacagacgataccgccatctactattgcgccaagcactactattacggcggcagctatgccatggattactggggccagggcacatccgtgaccgtgtctagcaccacaaccccagcacctcgcccaccaacaccagcaccaaccatcgcatcccagccactgtctctgaggcccgaggcatgtaggcctgcagcaggaggcgccgtgcacaccaggggcctggactttgcctgcgatatctatatctgggcaccactggcaggaacatgtggcgtgctgctgctgtccctggtcatcaccctgtattgcaagagaggccggaagaagctgctgtacatcttcaagcagcccttcatgaggcccgtgcagacaacccaggaggaggacggctgcagctgtcggttcccagaggaggaggagggaggatgtgagctgagggtgaagttttctaggagcgccgatgcaccagcatataagcagggacagaaccagctgtacaacgagctgaatctgggcaggagagaggagtacgacgtgctggataagaggaggggaagggaccccgagatgggaggcaagccaaggagaaagaacccccaggagggcctgtataatgagctgcagaaggacaagatggccgaggcctactccgagatcggcatgaagggagagcggcgcaggggcaagggacacgatggcctgtatcagggcctgtctacagccaccaaggacacctacgatgcactgcacatgcaggccctgcctccaaggtga

SEQ ID NO: 542 - DNA, 1782 bp, Artificial Sequence
  Description of Artificial Sequence: Synthetic Construct
atggcactgccagtgacagccctgctgctgcctctggccctgctgctgcacgcagccagacctgacatccagatgacacagaccacaagctccctgagcgcctccctgggcgacagagtgaccatctcttgccgggccagccaggatatctccaagtatctgaactggtaccagcagaagcccgatggcacagtgaagctgctgatctatcacacctctcgcctgcacagcggcgtgccttccaggttctctggcagcggctccggcacagactactctctgaccatcagcaacctggagcaggaggatatcgccacctatttctgccagcagggcaatacactgccctacacctttggcggcggcacaaagctggagatcaccggcggcggcggctctggaggaggaggcagcggcggaggaggctccgaggtgaagctgcaggagtccggaccaggcctggtggcaccatctcagagcctgtccgtgacatgtaccgtgagcggcgtgtccctgcctgactacggcgtgagctggatcagacagccacctaggaagggcctggagtggctgggcgtgatctggggctccgagacaacatactataactccgccctgaagtctcggctgaccatcatcaaggacaactctaagagccaggtgttcctgaagatgaattccctgcagacagacgataccgccatctactattgcgccaagcactactattacggcggctcctatgccatggattactggggccagggcacatctgtgaccgtgtctagcggcgtgcaggtggagacaatcagcccaggcgacggacgcacctttccaaagaggggacagacatgcgtggtgcactacaccggcatgctggaggatggcaagaaggtggactcctctagagatcggaataagccattcaagtttatgctgggcaagcaggaagtgatcagaggctgggaggagggagtggcacagatgtctgtgggacagcgggccaagctgacaatcagccctgactatgcatacggagcaaccggacacccaggaatcatcccaccacacgccacactggtgttcgatgtggagctgctgaagcctgagacaacaaccccagcacccagacctccaacacctgcaccaaccatcgcaagccagcctctgtccctgaggcccgaggcatgtaggccagcagcaggaggcgccgtgcacacccggggcctggactttgcctgcgatatctatatctgggcaccactggcaggaacatgtggcgtgctgctgctgtccctggtcatcaccctgtattgcaagcgcggcaggaagaagctgctgtacatcttcaagcagccctttatgcgccctgtgcagacaacccaggaggaggacggctgcagctgtaggttcccagaggaggaggagggaggatgtgagctgagggtgaagttttccaggtctgccgatgcccccgcctataagcagggccagaatcagctgtacaacgagctgaatctgggcaggagagaggagtacgacgtgctggataagaggaggggacgcgaccccgagatgggaggcaagcctaggagaaagaacccacaggagggcctgtataatgagctgcagaaggacaagatggccgaggcctactctgagatcggcatgaagggagagcggcgcaggggcaagggacacgatggcctgtatcagggcctgagcacagccaccaaggacacctacgatgcactgcacatgcaggccctgccacctaggtga

SEQ ID NO: 543 - DNA, 1935 bp, Artificial Sequence
  Description of Artificial Sequence: Synthetic Construct
atggcactgcctgtgacagccctgctgctgccactggccctgctgctgcacgcagcccgccctgacatccagatgacacagaccacaagctccctgagcgcctccctgggcgacagagtgaccatcagctgccgggcctcccaggatatctctaagtatctgaactggtaccagcagaagccagatggcacagtgaagctgctgatctatcacaccagccgcctgcactccggagtgccctctaggttctctggcagcggctccggcacagactacagcctgaccatctccaacctggagcaggaggatatcgccacctatttctgccagcagggcaatacactgccatacacctttggcggcggcacaaagctggagatcaccggaggaggaggcagcggaggaggaggctccggcggcggcggctctgaggtgaagctgcaggagtccggaccaggcctggtggcaccttctcagagcctgtccgtgacatgtaccgtgtctggcgtgagcctgcccgactacggcgtgtcttggatcagacagccacctaggaagggcctggagtggctgggcgtgatctggggcagcgagacaacatactataattctgccctgaagagcaggctgaccatcatcaaggacaactctaagagccaggtgttcctgaagatgaattccctgcagacagacgataccgccatctactattgcgccaagcactactattacggcggctcttatgccatggattactggggccagggcacaagcgtgaccgtgtctagcatctccctgatcgccgccctggcagtggactacgtgatcggcatggagaacgccatgccctggaatctgcctgccgatctggcctggtttaagagaaacacactgaataagcccgtgatcatgggccggcacacctgggagtctatcggcaggcccctgcctggcaggaagaacatcatcctgtcctctcagcctggcacagacgatagagtgacctgggtgaagagcgtggacgaggcaatcgcagcatgtggcgatgtgcccgagatcatggtcatcggcggcggcagagtgatcgagcagttcctgcctaaggcccagaagctgtatctgacacacatcgacgccgaggtggagggcgacacccactttccagattacgagcccgacgattgggagtccgtgttctctgagtttcacgacgccgatgcccagaattcccactcttattgcttcgagatcctggagaggagaaccacaaccccagcaccccgcccaccaacacctgcaccaaccatcgcctcccagccactgtctctgaggcccgaggcatgtaggcctgcagcaggaggcgccgtgcacaccaggggcctggactttgcctgcgatatctacatctgggcacctctggcaggaacatgtggcgtgctgctgctgtccctggtcatcaccctgtattgcaagcgcggcaggaagaagctgctgtacatcttcaagcagccttttatgcgcccagtgcagacaacccaggaggaggacggctgcagctgtaggttccctgaggaggaggagggaggatgtgagctgagggtgaagtttagcaggtccgccgatgccccagcctataagcagggccagaaccagctgtacaacgagctgaatctgggcaggagggaagagtacgacgtgctggataagaggagaggaagggaccccgagatgggaggcaagccaaggaggaagaacccacaggagggcctgtataatgagctgcagaaggacaagatggccgaggcctacagcgagatcggcatgaagggagagaggagacggggcaagggacacgatggcctgtatcagggcctgtccacagccaccaaggacacctacgatgcactgcacatgcaggccctgcctccaaggtga

SEQ ID NO: 544 - DNA, 1782 bp, Artificial Sequence
  Description of Artificial Sequence: Synthetic Construct
atggcactgccagtgacagccctgctgctgcctctggccctgctgctgcacgcagccagacctgacatccagatgacacagaccacaagctccctgagcgcctccctgggcgacagagtgaccatctcttgccgggccagccaggatatctccaagtatctgaactggtaccagcagaagccagatggcacagtgaagctgctgatctatcacacctctcgcctgcacagcggagtgccctccaggttctctggcagcggctccggcacagactactctctgaccatcagcaacctggagcaggaggatatcgccacctatttctgccagcagggcaatacactgccctacacctttggcggcggcacaaagctggagatcaccggcggcggcggctctggaggaggaggcagcggcggaggaggctccgaggtgaagctgcaggagtccggaccaggcctggtggcaccatctcagagcctgtccgtgacatgtaccgtgagcggcgtgtccctgcctgactacggcgtgagctggatcagacagccacctaggaagggcctggagtggctgggcgtgatctggggctccgagacaacatactataattccgccctgaagtctcggctgacaatcatcaaggacaactctaagagccaggtgtttctgaagatgaatagcctgcagacagacgataccgccatctactattgcgccaagcactactattacggcggctcctatgccatggattactggggccagggcacatctgtgaccgtgtctagcaccacaaccccagcacccagaccaccaacacctgcaccaaccatcgcaagccagcctctgtccctgcgcccagaggcatgcaggccagcagcaggaggagcagtgcacacccggggcctggacttcgcatgtgatggagtgcaggtggagacaatctccccaggcgacggcagaacctttcccaagcggggccagacatgcgtggtgcactataccggcatgctggaggatggcaagaaggtggactcctctagagatcggaacaagccattcaagtttatgctgggcaagcaggaagtgatcagaggctgggaggagggagtggcacagatgtctgtgggacagcgggccaagctgacaatcagcccagactatgcatacggagcaaccggacaccctggaatcatccctccacacgccaccctggtgttcgatgtggagctgctgaagcctgagatctacatctgggcaccactggcaggaacatgcggcgtgctgctgctgtccctggtcatcaccctgtattgtaagcgcggcaggaagaagctgctgtacatcttcaagcagccctttatgcgccctgtgcagacaacccaggaggaggacggctgcagctgtaggttccctgaggaggaggagggaggatgtgagctgagggtgaagttttccaggtctgccgatgccccagcctataagcagggccagaatcagctgtacaacgagctgaatctgggcaggagagaggagtacgacgtgctggataagaggaggggacgcgaccccgagatgggaggcaagcctaggagaaagaacccacaggagggcctgtataatgagctgcagaaggacaagatggccgaggcctactctgagatcggcatgaagggagagcggcgcaggggcaagggacacgatggcctgtatcagggcctgagcacagccaccaaggacacctacgatgcactgcacatgcaggccctgccacctaggtga

SEQ ID NO: 545 - DNA, 1935 bp, Artificial Sequence
  Description of Artificial Sequence: Synthetic Construct
atggcactgcctgtgaccgccctgctgctgccactggccctgctgctgcacgcagcccgccctgacatccagatgacacagaccacaagctccctgagcgcctccctgggcgacagagtgaccatcagctgccgggcctcccaggatatctctaagtatctgaactggtaccagcagaagccagatggcacagtgaagctgctgatctatcacaccagccgcctgcactccggagtgccctctaggttctctggcagcggctccggcacagactacagcctgaccatctccaacctggagcaggaggatatcgccacctatttctgccagcagggcaatacactgccatacacctttggcggcggcacaaagctggagatcaccggaggaggaggcagcggaggaggaggctccggcggcggcggctctgaggtgaagctgcaggagtccggaccaggcctggtggcaccttctcagagcctgtccgtgacatgtaccgtgtctggcgtgagcctgcccgactacggcgtgtcttggatcagacagccacctaggaagggcctggagtggctgggcgtgatctggggcagcgagacaacatactataattctgccctgaagagcaggctgacaatcatcaaggacaactctaagagccaggtgtttctgaagatgaatagcctgcagacagacgataccgccatctactattgtgccaagcactactattacggcggcagctatgccatggattactggggccagggcacatccgtgaccgtgtctagcaccacaaccccagcacctcgcccaccaacaccagcaccaaccatcgcatcccagccactgtctctgcgccccgaggcatgcaggcctgcagcaggcggcgccgtgcacaccaggggcctggacttcgcctgtgatatctccctgatcgccgccctggcagtggactacgtgatcggcatggagaacgccatgccctggaatctgcctgccgatctggcctggtttaagagaaacacactgaataagcccgtgatcatgggccggcacacctgggagagcatcggcagacctctgccaggccggaagaacatcatcctgtcctctcagcctggcacagacgatagagtgacctgggtgaagtccgtggacgaggcaatcgcagcatgcggcgatgtgcccgagatcatggtcatcggcggcggcagagtgatcgagcagttcctgcctaaggcccagaagctgtatctgacacacatcgacgccgaggtggagggcgacacccactttccagattacgagcccgacgattgggagtccgtgttctctgagtttcacgacgccgatgcccagaattcccactcttattgtttcgagatcctggagagaagaatctacatctgggcacctctggcaggaacatgcggcgtgctgctgctgtctctggtcatcaccctgtattgtaagcgcggcaggaagaagctgctgtacatcttcaagcagccttttatgcgcccagtgcagacaacccaggaggaggacggctgcagctgtaggttccctgaggaggaggagggaggatgcgagctgagggtgaagtttagcaggtccgccgatgccccagcctataagcagggccagaaccagctgtacaacgagctgaatctgggcaggagggaagagtacgacgtgctggataagaggagaggaagggaccccgagatgggaggcaagccaaggaggaagaacccacaggagggcctgtataatgagctgcagaaggacaagatggccgaggcctactccgagatcggcatgaagggagagaggagacggggcaagggacacgatggcctgtatcagggcctgtctacagccaccaaggacacctacgatgcactgcacatgcaggccctgcctccaaggtga

SEQ ID NO: 546 - DNA, 1950 bp, Artificial Sequence
  Description of Artificial Sequence: Synthetic Construct
atggcactgcctgtgaccgccctgctgctgccactggccctgctgctgcacgcagccaggcccgacatccagatgacacagaccacaagctccctgtccgcctctctgggcgacagagtgaccatcagctgccgggcctcccaggatatctctaagtatctgaactggtaccagcagaagcccgatggcacagtgaagctgctgatctatcacaccagccgcctgcactccggagtgccttctaggttcagcggctccggctctggcacagactacagcctgaccatctccaacctggagcaggaggatatcgccacctatttctgccagcagggcaatacactgccttacacctttggcggcggcacaaagctggagatcaccggaggaggaggcagcggaggaggaggctccggcggcggcggctctgaggtgaagctgcaggagtccggaccaggcctggtggcacctagccagtccctgtctgtgacatgtaccgtgtccggcgtgtctctgccagactacggcgtgtcttggatcaggcagccacctaggaagggcctggagtggctgggcgtgatctggggcagcgagacaacatactataattctgccctgaagagcagactgacaatcatcaaggacaacagcaagtcccaggtgttcctgaagatgaatagcctgcagacagacgataccgccatctactattgcgccaagcactactattacggcggcagctatgccatggattactggggccagggcacatccgtgaccgtgtctagcaccacaaccccagcacctcgcccaccaacaccagcaccaaccatcgcatcccagccactgtctctgaggcccgaggcatgtaggcctgcagcaggaggcgccgtgcacaccaggggcctggactttgcctgcgatatctatatctgggcaccactggcaggaacatgtggcgtgctgctgctgtccctggtcatcaccctgtattgcaagagaggccggaagaagctgctgtacatcttcaagcagcccttcatgaggcccgtgcagacaacccaggaggaggacggctgcagctgtcggttcccagaggaggaggagggaggatgtgagctgagggtgaagttttctaggagcgccgatgcaccagcatataagcagggacagaaccagctgtacaacgagctgaatctgggcaggagagaggagtacgacgtgctggataagaggaggggaagggaccccgagatgggaggcaagccaaggagaaagaacccccaggagggcctgtataatgagctgcagaaggacaagatggccgaggcctactccgagatcggcatgaagggagagcggcgcaggggcaagggacacgatggcctgtatcagggcctgtctacagccaccaaggacacctacgatgcactgcacatgcaggccctgcctccaaggggaggcagcggaggaatctccctgatcgccgccctggcagtggaccacgtgatcggcatggagaacgccatgccatggaatctgcccgccgatctggcctggttcaagcggaacaccctgaataagccagtgatcatgggcagacacacatgggagtctatcggcaggcccctgcctggacgcaagaacatcatcctgagctcccagcccggcaccgacgatagggtgacatgggtgaagtccgtggacgaggcaatcgcagcatgcggcgatgtgcccgagatcatggtcatcggcggcggcagagtgtacgagcagttcctgcctaaggcccagaagctgtatctgacccacatcgacgccgaggtggagggcgacacacactttcctgattacaagccagacgattgggagtccgtgttctctgagtttcacgacgccgatgcccagaattctcacagctattgttttgagatcctggagcggagatga

SEQ ID NO: 547 - DNA, 1797 bp, Artificial Sequence
  Description of Artificial Sequence: Synthetic Construct
atggcactgcctgtgaccgccctgctgctgccactggccctgctgctgcacgcagccaggcccgacatccagatgacacagaccacaagctccctgtccgcctctctgggcgacagagtgaccatcagctgccgggcctcccaggatatctctaagtatctgaactggtaccagcagaagcccgatggcacagtgaagctgctgatctatcacaccagccgcctgcactccggagtgccttctaggttcagcggctccggctctggcacagactacagcctgaccatctccaacctggagcaggaggatatcgccacctatttctgccagcagggcaatacactgccttacacctttggcggcggcacaaagctggagatcaccggaggaggaggcagcggaggaggaggctccggcggcggcggctctgaggtgaagctgcaggagtccggaccaggcctggtggcacctagccagtccctgtctgtgacatgtaccgtgtccggcgtgtctctgccagactacggcgtgtcttggatcaggcagccacctaggaagggcctggagtggctgggcgtgatctggggcagcgagacaacatactataattctgccctgaagagcagactgacaatcatcaaggacaacagcaagtcccaggtgttcctgaagatgaatagcctgcagacagacgataccgccatctactattgcgccaagcactactattacggcggcagctatgccatggattactggggccagggcacatccgtgaccgtgtctagcaccacaaccccagcacctcgcccaccaacaccagcaccaaccatcgcatcccagccactgtctctgaggcccgaggcatgtaggcctgcagcaggaggcgccgtgcacaccaggggcctggactttgcctgcgatatctatatctgggcaccactggcaggaacatgtggcgtgctgctgctgtccctggtcatcaccctgtattgcaagagaggccggaagaagctgctgtacatcttcaagcagcccttcatgaggcccgtgcagacaacccaggaggaggacggctgcagctgtcggttcccagaggaggaggagggaggatgtgagctgagggtgaagttttctaggagcgccgatgcaccagcatataagcagggacagaaccagctgtacaacgagctgaatctgggcaggagagaggagtacgacgtgctggataagaggaggggaagggaccccgagatgggaggcaagccaaggagaaagaacccccaggagggcctgtataatgagctgcagaaggacaagatggccgaggcctactccgagatcggcatgaagggagagcggcgcaggggcaagggacacgatggcctgtatcagggcctgtctacagccaccaaggacacctacgatgcactgcacatgcaggccctgcctccaaggggaggctctggaggaggagtgcaggtggagacaatcagcccaggcgacggaaggacattcccaaagaggggacagacctgcgtggtgcactacacaggcatgctgggcgatggcaagaaggtggacagctcccgggatagaaacaagcccttcaagtttatgctgggcaagcaggaagtgatcaggggatgggaggagggagtggcacagatgtccgtgggacagggcgccaagctgaccatctctcctgactacgcctatggagcaacaggacacccaggaatcatcccacctcacgccaccctggtgtttgatgtggagctgctggagctggagtga

SEQ ID NO: 548 - DNA, 2034 bp, Artificial Sequence
  Description of Artificial Sequence: Synthetic Construct
atggcactgcctgtgaccgccctgctgctgccactggccctgctgctgcacgcagccaggcccgacatccagatgacacagaccacaagctccctgtccgcctctctgggcgacagagtgaccatcagctgccgggcctcccaggatatctctaagtatctgaactggtaccagcagaagcccgatggcacagtgaagctgctgatctatcacaccagccgcctgcactccggagtgccttctaggttcagcggctccggctctggcacagactacagcctgaccatctccaacctggagcaggaggatatcgccacctatttctgccagcagggcaatacactgccttacacctttggcggcggcacaaagctggagatcaccggaggaggaggcagcggaggaggaggctccggcggcggcggctctgaggtgaagctgcaggagtccggaccaggcctggtggcacctagccagtccctgtctgtgacatgtaccgtgtccggcgtgtctctgccagactacggcgtgtcttggatcaggcagccacctaggaagggcctggagtggctgggcgtgatctggggcagcgagacaacatactataattctgccctgaagagcagactgacaatcatcaaggacaacagcaagtcccaggtgttcctgaagatgaatagcctgcagacagacgataccgccatctactattgcgccaagcactactattacggcggcagctatgccatggattactggggccagggcacatccgtgaccgtgtctagcaccacaaccccagcacctcgcccaccaacaccagcaccaaccatcgcatcccagccactgtctctgaggcccgaggcatgtaggcctgcagcaggaggcgccgtgcacaccaggggcctggactttgcctgcgatatctatatctgggcaccactggcaggaacatgtggcgtgctgctgctgtccctggtcatcaccctgtattgcaagagaggccggaagaagctgctgtacatcttcaagcagcccttcatgaggcccgtgcagacaacccaggaggaggacggctgcagctgtcggttcccagaggaggaggagggaggatgtgagctgagggtgaagttttctaggagcgccgatgcaccagcatataagcagggacagaaccagctgtacaacgagctgaatctgggcaggagagaggagtacgacgtgctggataagaggaggggaagggaccccgagatgggaggcaagccaaggagaaagaacccccaggagggcctgtataatgagctgcagaaggacaagatggccgaggcctactccgagatcggcatgaagggagagcggcgcaggggcaagggacacgatggcctgtatcagggcctgtctacagccaccaaggacacctacgatgcactgcacatgcaggccctgcctccaaggggaggcagcggaggagtgggctccctgaactgcatcgtggccgtgagccagaacatgggcatcggcaagaatggcgacctgccttggccacctctgaggaacgagttcagatactttcagaggatgaccacaaccagctccgtggagggcaagcagaacctggtcatcatgggcaagaagacatggttctctatccccgagaagaaccgccctctgaagggccggatcaatctggtgctgagcagagagctgaaggagccaccacagggagcacacttcctgagccggagcctggacgatgccctgaagctgaccgagcagcccgagctggccaacaaggtggacatggtgtggatcgtgggcggctctagcgtgatcaaggaggccatgaatcacccaggccacctgaagctgttcgtgacaagaatcatgcaggactttgagtccgataccttctttcccgagatcgacctggagaagtacaagctgctgcctgagtatccaggcgtgctgtctgatgtgcaggaggagaagggcatcaagtacaagttcgaggtgtatgagaagaatgattga

SEQ ID NO: 549 - DNA, 2034 bp, Artificial Sequence
  Description of Artificial Sequence: Synthetic Construct
atggcactgcctgtgaccgccctgctgctgccactggccctgctgctgcacgcagccaggcccgacatccagatgacacagaccacaagctccctgtccgcctctctgggcgacagagtgaccatcagctgccgggcctcccaggatatctctaagtatctgaactggtaccagcagaagcccgatggcacagtgaagctgctgatctatcacaccagccgcctgcactccggagtgccttctaggttcagcggctccggctctggcacagactacagcctgaccatctccaacctggagcaggaggatatcgccacctatttctgccagcagggcaatacactgccttacacctttggcggcggcacaaagctggagatcaccggaggaggaggcagcggaggaggaggctccggcggcggcggctctgaggtgaagctgcaggagtccggaccaggcctggtggcacctagccagtccctgtctgtgacatgtaccgtgtccggcgtgtctctgccagactacggcgtgtcttggatcaggcagccacctaggaagggcctggagtggctgggcgtgatctggggcagcgagacaacatactataattctgccctgaagagcagactgacaatcatcaaggacaacagcaagtcccaggtgttcctgaagatgaatagcctgcagacagacgataccgccatctactattgcgccaagcactactattacggcggcagctatgccatggattactggggccagggcacatccgtgaccgtgtctagcaccacaaccccagcacctcgcccaccaacaccagcaccaaccatcgcatcccagccactgtctctgaggcccgaggcatgtaggcctgcagcaggaggcgccgtgcacaccaggggcctggactttgcctgcgatatctatatctgggcaccactggcaggaacatgtggcgtgctgctgctgtccctggtcatcaccctgtattgcaagagaggccggaagaagctgctgtacatcttcaagcagcccttcatgaggcccgtgcagacaacccaggaggaggacggctgcagctgtcggttcccagaggaggaggagggaggatgtgagctgagggtgaagttttctaggagcgccgatgcaccagcatataagcagggacagaaccagctgtacaacgagctgaatctgggcaggagagaggagtacgacgtgctggataagaggaggggaagggaccccgagatgggaggcaagccaaggagaaagaacccccaggagggcctgtataatgagctgcagaaggacaagatggccgaggcctactccgagatcggcatgaagggagagcggcgcaggggcaagggacacgatggcctgtatcagggcctgtctacagccaccaaggacacctacgatgcactgcacatgcaggccctgcctccaaggggaggcagcggaggagtgggctccctgaactgcatcgtggccgtgagccagaacatgggcatcggcaagaatggcgacctgccttggccacctctgaggaacgagttcagatactttcagaggatgaccacaaccagctccgtggagggcaagcagaacctggtcatcatgggcaagaagacatggttctctatccccgagaagaaccgccctctgaagggccggatcaatctggtgctgagcagagagctgaaggagccaccacagggagcacacttcctgagccggagcctggacgatgccctgaagctgaccgagcagcccgagctggccaacaaggtggacatggtgtggatcgtgggcggctctagcgtgatcaaggagttcatgaatcacccaggccacctgaagctgttcgtgacaagaatcatgcaggactttgagtccgataccttctttcccgagatcgacctggagaagtacaagctgctgcctgagtatccaggcgtgctgtctgatgtgcaggaggagaagggcatcaagtacaagttcgaggtgtatgagaagaatgattga

SEQ ID NO: 550 - DNA, 2034 bp, Artificial Sequence
  Description of Artificial Sequence: Synthetic Construct
atggcactgcctgtgaccgccctgctgctgccactggccctgctgctgcacgcagccaggcccgacatccagatgacacagaccacaagctccctgtccgcctctctgggcgacagagtgaccatcagctgccgggcctcccaggatatctctaagtatctgaactggtaccagcagaagcccgatggcacagtgaagctgctgatctatcacaccagccgcctgcactccggagtgccttctaggttcagcggctccggctctggcacagactacagcctgaccatctccaacctggagcaggaggatatcgccacctatttctgccagcagggcaatacactgccttacacctttggcggcggcacaaagctggagatcaccggaggaggaggcagcggaggaggaggctccggcggcggcggctctgaggtgaagctgcaggagtccggaccaggcctggtggcacctagccagtccctgtctgtgacatgtaccgtgtccggcgtgtctctgccagactacggcgtgtcttggatcaggcagccacctaggaagggcctggagtggctgggcgtgatctggggcagcgagacaacatactataattctgccctgaagagcagactgacaatcatcaaggacaacagcaagtcccaggtgttcctgaagatgaatagcctgcagacagacgataccgccatctactattgcgccaagcactactattacggcggcagctatgccatggattactggggccagggcacatccgtgaccgtgtctagcaccacaaccccagcacctcgcccaccaacaccagcaccaaccatcgcatcccagccactgtctctgaggcccgaggcatgtaggcctgcagcaggaggcgccgtgcacaccaggggcctggactttgcctgcgatatctatatctgggcaccactggcaggaacatgtggcgtgctgctgctgtccctggtcatcaccctgtattgcaagagaggccggaagaagctgctgtacatcttcaagcagcccttcatgaggcccgtgcagacaacccaggaggaggacggctgcagctgtcggttcccagaggaggaggagggaggatgtgagctgagggtgaagttttctaggagcgccgatgcaccagcatataagcagggacagaaccagctgtacaacgagctgaatctgggcaggagagaggagtacgacgtgctggataagaggaggggaagggaccccgagatgggaggcaagccaaggagaaagaacccccaggagggcctgtataatgagctgcagaaggacaagatggccgaggcctactccgagatcggcatgaagggagagcggcgcaggggcaagggacacgatggcctgtatcagggcctgtctacagccaccaaggacacctacgatgcactgcacatgcaggccctgcctccaaggggaggcagcggaggagtgggctccctgaactgcatcgtggccgtgagccagaacatgggcatcggcaagaatggcgacctgccttggccacctctgaggaacgagttcagatactttaagaggatgaccacaaccagctccgtggagggcaagcagaacctggtcatcatgggcaagaagacatggttctctatccccgagaagaaccgccctctgaagggccggatcaatctggtgctgagcagagagctgaaggagccaccacagggagcacacttcctgagccggagcctggacgatgccctgaagctgaccgagcagcccgagctggccaacaaggtggacatggtgtggatcgtgggcggctctagcgtgatcaaggaggccatgaatcacccaggccacctgaagctgttcgtgacaagaatcatgcaggactttgagtccgataccttctttcccgagatcgacctggagaagtacaagctgctgcctgagtatccaggcgtgctgtctgatgtgcaggaggagaagggcatcaagtacaagttcgaggtgtatgagaagaatgattga

SEQ ID NO: 551 - DNA, 2034 bp, Artificial Sequence
  Description of Artificial Sequence: Synthetic Construct
atggcactgcctgtgaccgccctgctgctgccactggccctgctgctgcacgcagccaggcccgacatccagatgacacagaccacaagctccctgtccgcctctctgggcgacagagtgaccatcagctgccgggcctcccaggatatctctaagtatctgaactggtaccagcagaagcccgatggcacagtgaagctgctgatctatcacaccagccgcctgcactccggagtgccttctaggttcagcggctccggctctggcacagactacagcctgaccatctccaacctggagcaggaggatatcgccacctatttctgccagcagggcaatacactgccttacacctttggcggcggcacaaagctggagatcaccggaggaggaggcagcggaggaggaggctccggcggcggcggctctgaggtgaagctgcaggagtccggaccaggcctggtggcacctagccagtccctgtctgtgacatgtaccgtgtccggcgtgtctctgccagactacggcgtgtcttggatcaggcagccacctaggaagggcctggagtggctgggcgtgatctggggcagcgagacaacatactataattctgccctgaagagcagactgacaatcatcaaggacaacagcaagtcccaggtgttcctgaagatgaatagcctgcagacagacgataccgccatctactattgcgccaagcactactattacggcggcagctatgccatggattactggggccagggcacatccgtgaccgtgtctagcaccacaaccccagcacctcgcccaccaacaccagcaccaaccatcgcatcccagccactgtctctgaggcccgaggcatgtaggcctgcagcaggaggcgccgtgcacaccaggggcctggactttgcctgcgatatctatatctgggcaccactggcaggaacatgtggcgtgctgctgctgtccctggtcatcaccctgtattgcaagagaggccggaagaagctgctgtacatcttcaagcagcccttcatgaggcccgtgcagacaacccaggaggaggacggctgcagctgtcggttcccagaggaggaggagggaggatgtgagctgagggtgaagttttctaggagcgccgatgcaccagcatataagcagggacagaaccagctgtacaacgagctgaatctgggcaggagagaggagtacgacgtgctggataagaggaggggaagggaccccgagatgggaggcaagccaaggagaaagaacccccaggagggcctgtataatgagctgcagaaggacaagatggccgaggcctactccgagatcggcatgaagggagagcggcgcaggggcaagggacacgatggcctgtatcagggcctgtctacagccaccaaggacacctacgatgcactgcacatgcaggccctgcctccaaggggaggcagcggaggagtgggctccctgaactgcatcgtggccgtgagccagaacatgggcatcggcaagaatggcgacctgccttggccacctctgaggaacgagttcagatactttttcaggatgaccacaaccagctccgtggagggcaagcagaacctggtcatcatgggcaagaagacatggttctctatccccgagaagttccgccctctgaagggccggatcaatctggtgctgagcagagagctgaaggagccaccacagggagcacacttcctgagccggagcctggacgatgccctgaagctgaccgagcagcccgagctggccaacaaggtggacatggtgtggatcgtgggcggctctagcgtgatcaaggaggccatgaatcacccaggccacctgaagctgttcgtgacaagaatcatgcaggactttgagtccgataccttctttcccgagatcgacctggagaagtacaagctgctgcctgagtatccaggcgtgctgtctgatgtgcaggaggagaagggcatcaagtacaagttcgaggtgtatgagaagaatgattga

SEQ ID NO: 552 - DNA, 1824 bp, Artificial Sequence
  Description of Artificial Sequence: Synthetic Construct
atggcactgcctgtgaccgccctgctgctgccactggccctgctgctgcacgcagccaggccttctggaggcgtgcaggtggagacaatcagcccaggcgacggacgcaccttcccaaagaggggacagacatgcgtggtgcactacaccggcatgctggaggatggcaagaaggtggacagctccagagatcggaacaagccattcaagtttatgctgggcaagcaggaagtgatcagaggatgggaggagggagtggcacagatgagcgtgggacagcgggccaagctgacaatctcccctgactatgcatacggagcaaccggacacccaggaatcatcccacctcacgccacactggtgttcgacgtggagctgctgaagcctgaggagtccaggagagtgcggcgcaacaagcggtctaaggatatccagatgacacagaccacaagctccctgtccgcctctctgggcgacagagtgaccatcagctgccgggcctcccaggatatctctaagtatctgaactggtaccagcagaagcccgatggcacagtgaagctgctgatctatcacaccagccgcctgcactccggagtgccttctaggttcagcggctccggctctggcacagactacagcctgaccatctccaacctggagcaggaggatatcgccacctatttctgccagcagggcaatacactgccttacacctttggcggcggcacaaagctggagatcaccggaggaggaggcagcggaggaggaggctccggcggcggcggctctgaggtgaagctgcaggagtccggaccaggcctggtggcacctagccagtccctgtctgtgacatgtaccgtgtccggcgtgtctctgccagactacggcgtgtcttggatcaggcagccacctaggaagggcctggagtggctgggcgtgatctggggcagcgagacaacatactataattctgccctgaagagcagactgacaatcatcaaggacaacagcaagtcccaggtgttcctgaagatgaatagcctgcagacagacgataccgccatctactattgcgccaagcactactattacggcggcagctatgccatggattactggggccagggcacatccgtgaccgtgtctagcaccacaaccccagcacctcgcccaccaacaccagcaccaaccatcgcatcccagccactgtctctgaggcccgaggcatgtaggcctgcagcaggaggcgccgtgcacaccaggggcctggactttgcctgcgatatctatatctgggcaccactggcaggaacatgtggcgtgctgctgctgtccctggtcatcaccctgtattgcaagagaggccggaagaagctgctgtacatcttcaagcagcccttcatgaggcccgtgcagacaacccaggaggaggacggctgcagctgtcggttcccagaggaggaggagggaggatgtgagctgagggtgaagttttctaggagcgccgatgcaccagcatataagcagggacagaaccagctgtacaacgagctgaatctgggcaggagagaggagtacgacgtgctggataagaggaggggaagggaccccgagatgggaggcaagccaaggagaaagaacccccaggagggcctgtataatgagctgcagaaggacaagatggccgaggcctactccgagatcggcatgaagggagagcggcgcaggggcaagggacacgatggcctgtatcagggcctgtctacagccaccaaggacacctacgatgcactgcacatgcaggccctgcctccaaggtga

SEQ ID NO: 553 - DNA, 1977 bp, Artificial Sequence
  Description of Artificial Sequence: Synthetic Construct
atggcactgcctgtgaccgccctgctgctgccactggccctgctgctgcacgcagccaggccttctggaatcagcctgatcgccgccctggcagtggactacgtgatcggcatggagaacgccatgccctggaatctgcctgccgatctggcctggttcaagagaaacacactgaataagcccgtgatcatgggccggcacacctgggagtccatcggcaggcccctgcctggcaggaagaacatcatcctgagctcccagcctggcacagacgatagagtgacctgggtgaagagcgtggacgaggcaatcgcagcatgcggcgatgtgcccgagatcatggtcatcggcggcggcagagtgatcgagcagttcctgcctaaggcccagaagctgtatctgacacacatcgacgccgaggtggagggcgacacccactttccagattacgagcccgacgattgggagtccgtgttctctgagtttcacgacgccgatgcccagaacagccactcctactgcttcgagatcctggagaggagagagtctcggcgcgtgaggagaaataagagaagcaaggacatccagatgacacagaccacaagctccctgtccgcctctctgggcgacagagtgaccatcagctgccgggcctcccaggatatctctaagtatctgaactggtaccagcagaagcccgatggcacagtgaagctgctgatctatcacaccagccgcctgcactccggagtgccttctaggttcagcggctccggctctggcacagactacagcctgaccatctccaacctggagcaggaggatatcgccacctatttctgccagcagggcaatacactgccttacacctttggcggcggcacaaagctggagatcaccggaggaggaggcagcggaggaggaggctccggcggcggcggctctgaggtgaagctgcaggagtccggaccaggcctggtggcacctagccagtccctgtctgtgacatgtaccgtgtccggcgtgtctctgccagactacggcgtgtcttggatcaggcagccacctaggaagggcctggagtggctgggcgtgatctggggcagcgagacaacatactataattctgccctgaagagcagactgacaatcatcaaggacaacagcaagtcccaggtgttcctgaagatgaatagcctgcagacagacgataccgccatctactattgcgccaagcactactattacggcggcagctatgccatggattactggggccagggcacatccgtgaccgtgtctagcaccacaaccccagcacctcgcccaccaacaccagcaccaaccatcgcatcccagccactgtctctgaggcccgaggcatgtaggcctgcagcaggaggcgccgtgcacaccaggggcctggactttgcctgcgatatctatatctgggcaccactggcaggaacatgtggcgtgctgctgctgtccctggtcatcaccctgtattgcaagagaggccggaagaagctgctgtacatcttcaagcagcccttcatgaggcccgtgcagacaacccaggaggaggacggctgcagctgtcggttcccagaggaggaggagggaggatgtgagctgagggtgaagttttctaggagcgccgatgcaccagcatataagcagggacagaaccagctgtacaacgagctgaatctgggcaggagagaggagtacgacgtgctggataagaggaggggaagggaccccgagatgggaggcaagccaaggagaaagaacccccaggagggcctgtataatgagctgcagaaggacaagatggccgaggcctactccgagatcggcatgaagggagagcggcgcaggggcaagggacacgatggcctgtatcagggcctgtctacagccaccaaggacacctacgatgcactgcacatgcaggccctgcctccaaggtga

SEQ ID NO: 554 - DNA, 2061 bp, Artificial Sequence
  Description of Artificial Sequence: Synthetic Construct
atggcactgccagtgaccgccctgctgctgcctctggccctgctgctgcacgcagccagaccaagcggagtgggctccctgaactgcatcgtggccgtgagccagaacatgggcatcggcaagaatggcgacctgccatggccacctctgaggaacgagttcaggtactttcagagaatgaccacaaccagctccgtggagggcaagcagaacctggtcatcatgggcaagaagacctggttcagcatccccgagaagaacaggcctctgaagggcagaatcaatctggtgctgtccagggagctgaaggagccaccacagggagcccactttctgtctcgcagcctggacgatgccctgaagctgacagagcagcccgagctggccaacaaggtggatatggtgtggatcgtgggcggctctagcgtgatcaaggagttcatgaatcaccccggccacctgaagctgttcgtgaccaggatcatgcaggactttgagtccgatacattctttcctgagatcgacctggagaagtataagctgctgccagagtaccccggcgtgctgagcgatgtgcaggaggagaagggcatcaagtataagtttgaggtgtacgagaagaacgacgagtctaggagagtgcggcgcaataagagaagcaaggacatccagatgacacagaccacaagctccctgtccgcctctctgggcgacagagtgaccatcagctgccgggcctcccaggatatctctaagtatctgaactggtaccagcagaagcccgatggcacagtgaagctgctgatctatcacaccagccgcctgcactccggagtgccttctaggttcagcggctccggctctggcacagactacagcctgaccatctccaacctggagcaggaggatatcgccacctatttctgccagcagggcaatacactgccttacacctttggcggcggcacaaagctggagatcaccggaggaggaggcagcggaggaggaggctccggcggcggcggctctgaggtgaagctgcaggagtccggaccaggcctggtggcacctagccagtccctgtctgtgacatgtaccgtgtccggcgtgtctctgccagactacggcgtgtcttggatcaggcagccacctaggaagggcctggagtggctgggcgtgatctggggcagcgagacaacatactataattctgccctgaagagcagactgacaatcatcaaggacaacagcaagtcccaggtgttcctgaagatgaatagcctgcagacagacgataccgccatctactattgcgccaagcactactattacggcggcagctatgccatggattactggggccagggcacatccgtgaccgtgtctagcaccacaaccccagcacctcgcccaccaacaccagcaccaaccatcgcatcccagccactgtctctgaggcccgaggcatgtaggcctgcagcaggaggcgccgtgcacaccaggggcctggactttgcctgcgatatctatatctgggcaccactggcaggaacatgtggcgtgctgctgctgtccctggtcatcaccctgtattgcaagagaggccggaagaagctgctgtacatcttcaagcagcccttcatgaggcccgtgcagacaacccaggaggaggacggctgcagctgtcggttcccagaggaggaggagggaggatgtgagctgagggtgaagttttctaggagcgccgatgcaccagcatataagcagggacagaaccagctgtacaacgagctgaatctgggcaggagagaggagtacgacgtgctggataagaggaggggaagggaccccgagatgggaggcaagccaaggagaaagaacccccaggagggcctgtataatgagctgcagaaggacaagatggccgaggcctactccgagatcggcatgaagggagagcggcgcaggggcaagggacacgatggcctgtatcagggcctgtctacagccaccaaggacacctacgatgcactgcacatgcaggccctgcctccaaggtga

SEQ ID NO: 555 - DNA, 2061 bp, Artificial Sequence
  Description of Artificial Sequence: Synthetic Construct
atggcactgcctgtgaccgccctgctgctgccactggccctgctgctgcacgcagccaggccaagcggagtgggctccctgaactgcatcgtggccgtgagccagaacatgggcatcggcaagaatggcgacctgccatggccacctctgaggaacgagttcaggtactttaagagaatgaccacaaccagctccgtggagggcaagcagaacctggtcatcatgggcaagaagacctggttcagcatccccgagaagaacaggcctctgaagggcagaatcaatctggtgctgtccagggagctgaaggagccaccacagggagcccactttctgtctcgcagcctggacgatgccctgaagctgacagagcagcccgagctggccaacaaggtggatatggtgtggatcgtgggcggctctagcgtgatcaaggaggccatgaatcaccccggccacctgaagctgttcgtgaccaggatcatgcaggactttgagtccgatacattctttcctgagatcgacctggagaagtataagctgctgccagagtaccccggcgtgctgagcgatgtgcaggaggagaagggcatcaagtataagttcgaggtgtacgagaagaacgacgagtctaggagagtgcggcgcaataagagaagcaaggacatccagatgacacagaccacaagctccctgtccgcctctctgggcgacagagtgaccatcagctgccgggcctcccaggatatctctaagtatctgaactggtaccagcagaagcccgatggcacagtgaagctgctgatctatcacaccagccgcctgcactccggagtgccttctaggttcagcggctccggctctggcacagactacagcctgaccatctccaacctggagcaggaggatatcgccacctatttctgccagcagggcaatacactgccttacacctttggcggcggcacaaagctggagatcaccggaggaggaggcagcggaggaggaggctccggcggcggcggctctgaggtgaagctgcaggagtccggaccaggcctggtggcacctagccagtccctgtctgtgacatgtaccgtgtccggcgtgtctctgccagactacggcgtgtcttggatcaggcagccacctaggaagggcctggagtggctgggcgtgatctggggcagcgagacaacatactataattctgccctgaagagcagactgacaatcatcaaggacaacagcaagtcccaggtgttcctgaagatgaatagcctgcagacagacgataccgccatctactattgcgccaagcactactattacggcggcagctatgccatggattactggggccagggcacatccgtgaccgtgtctagcaccacaaccccagcacctcgcccaccaacaccagcaccaaccatcgcatcccagccactgtctctgaggcccgaggcatgtaggcctgcagcaggaggcgccgtgcacaccaggggcctggactttgcctgcgatatctatatctgggcaccactggcaggaacatgtggcgtgctgctgctgtccctggtcatcaccctgtattgcaagagaggccggaagaagctgctgtacatcttcaagcagcccttcatgaggcccgtgcagacaacccaggaggaggacggctgcagctgtcggttcccagaggaggaggagggaggatgtgagctgagggtgaagttttctaggagcgccgatgcaccagcatataagcagggacagaaccagctgtacaacgagctgaatctgggcaggagagaggagtacgacgtgctggataagaggaggggaagggaccccgagatgggaggcaagccaaggagaaagaacccccaggagggcctgtataatgagctgcagaaggacaagatggccgaggcctactccgagatcggcatgaagggagagcggcgcaggggcaagggacacgatggcctgtatcagggcctgtctacagccaccaaggacacctacgatgcactgcacatgcaggccctgcctccaaggtga

SEQ ID NO: 556 - DNA, 603 bp, Artificial Sequence
  Description of Artificial Sequence: Synthetic Promoter
aagcttgggagttccgcgttacataacttacggtaaatggcccgcctggctgaccgcccaacgacccccgcccattgacgtcaataatgacgtatgttcccatagtaacgccaatagggactttccattgacgtcaatgggtggagtatttacggtaaactgcccacttggcagtacatcaagtgtatcatatgccaagtacgccccctattgacgtcaatgacggtaaatggcccgcctggcattatgcccagtacatgaccttatgggactttcctacttggcagtacatctacgtattagtcatcgctattaccatggtgatgcggttttggcagtacatcaatgggcgtggatagcggtttgactcacggggatttccaagtctccaccccattgacgtcaatgggagtttgttttggcaccaaaatcaacgggactttccaaaatgtcgtaacaactccgccccattgacgcaaatgggcggtaggcgtgtacggtgggaggtctatataagcagagctcgtttagtgaaccgtcagatcgcctggagacgccatccacgctgttttgacctccatagaagacaccgactctactaga

SEQ ID NO: 557 - DNA, 1339 bp, Artificial Sequence
  Description of Artificial Sequence: Synthetic Promoter
cgatagtaattcatacaaaaggactcgcccctgccttggggaatcccagggaccgtcgttaaactcccactaacgtagaacccagagatcgctgcgttcccgccccctcacccgcccgctctcgtcatcactgaggtggagaagagcatgcgtgaggctccggtgcccgtcagtgggcagagcgcacatcgcccacagtccccgagaagttggggggaggggtcggcaattgaaccggtgcctagagaaggtggcgcggggtaaactgggaaagtgatgtcgtgtactggctccgcctttttcccgagggtgggggagaaccgtatataagtgcagtagtcgccgtgaacgttctttttcgcaacgggtttgccgccagaacacaggtaagtgccgtgtgtggttcccgcgggcctggcctctttacgggttatggcccttgcgtgccttgaattacttccacgcccctggctgcagtacgtgattcttgatcccgagcttcgggttggaagtgggtgggagagttcgaggccttgcgcttaaggagccccttcgcctcgtgcttgagttgaggcctggcttgggcgctggggccgccgcgtgcgaatctggtggcaccttcgcgcctgtctcgctgctttcgataagtctctagccatttaaaatttttgatgacctgctgcgacgctttttttctggcaagatagtcttgtaaatgcgggccaagatctgcacactggtatttcggtttttggggccgcgggcggcgacggggcccgtgcgtcccagcgcacatgttcggcgaggcggggcctgcgagcgcggccaccgagaatcggacgggggtagtctcaagctggccggcctgctctggtgcctggcctcgcgccgccgtgtatcgccccgccctgggcggcaaggctggcccggtcggcaccagttgcgtgagcggaaagatggccgcttcccggccctgctgcagggagctcaaaatggaggacgcggcgctcgggagagcgggcgggtgagtcacccacacaaaggaaaagggcctttccgtcctcagccgtcgcttcatgtgactccacggagtaccgggcgccgtccaggcacctcgattagttctcgagcttttggagtacgtcgtctttaggttggggggaggggttttatgcgatggagtttccccacactgagtgggtggagactgaagttaggccagcttggcacttgatgtaattctccttggaatttgccctttttgagtttggatcttggttcattctcaagcctcagacagtggttcaaagtttttttcttccatttcaggtgtcgtgag

SEQ ID NO: 558 - DNA, 399 bp, Artificial Sequence
  Description of Artificial Sequence: Synthetic Promoter
ccggtaggcgccaaccggctccgttctttggtggccccttcgcgccaccttctactcctcccctagtcaggaagttcccccccgccccgcagctcgcgtcgtgcaggacgtgacaaatggaagtagcacgtctcactagtctcgtgcagatggacagcaccgctgagcaatggaagcgggtaggcctttggggcagcggccaatagcagctttgctccttcgctttctgggctcagaggctgggaaggggtgggtccgggggcgggctcaggggcgggctcaggggcggggcgggcgcccgaaggtcctccggaggcccggcattctgcacgcttcaaaagcgcacgtctgccgcgctgttctcctcttcctcatctccgggcctttcgacctgcagcc

SEQ ID NO: 559 - protein, 22 aa, Homo sapiens
MCHQQLVISWFSLVFLASPLVA

SEQ ID NO: 560 - protein, 15 aa, Artificial Sequence
  Description of Artificial Sequence: Synthetic Linker
GGGGSGGGGSGGGGS

SEQ ID NO: 561 - protein, 9 aa, Homo sapiens
SARNRQKRS

SEQ ID NO: 562 - protein, 8 aa, Homo sapiens
ARNRQKRS

SEQ ID NO: 563 - protein, 306 aa, Artificial Sequence
  Description of Artificial Sequence: Synthetic Payload sequence
IWELKKDVYVVELDWYPDAPGEMVVLTCDTPEEDGITWTLDQSSEVLGSGKTLTIQVKEFGDAGQYTCHKGGEVLSHSLLLLHKKEDGIWSTDILKDQKEPKNKTFLRCEAKNYSGRFTCWWLTTISTDLTFSVKSSRGSSDPQGVTCGAATLSAERVRGDNKEYEYSVECQEDSACPAAEESLPIEVMVDAVHKLKYENYTSSFFIRDIIKPDPPKNLQLKPLKNSRQVEVSWEYPDTWSTPHSYFSLTFCVQVQGKSKREKKDRVFTDKTSATVICRKNASISVRAQDRYYSSSWSEWASVPCS

SEQ ID NO: 564 - protein, 197 aa, Artificial Sequence
  Description of Artificial Sequence: Synthetic Payload sequence
RNLPVATPDPGMFPCLHHSQNLLRAVSNMLQKARQTLEFYPCTSEEIDHEDITKDKTSTVEACLPLELTKNESCLNSRETSFITNGSCLASRKTSFMMALCLSSIYEDLKMYQVEFKTMNAKLLMDPKRQIFLDQNMLAVIDELMQALNFNSETVPQKSSLEEPDFYKTKIKLCILLHAFRIRAVTIDRVMSYLNAS

SEQ ID NO: 565 - protein, 651 aa, Artificial Sequence
  Description of Artificial Sequence: Synthetic Construct
MCHQQLVISWFSLVFLASPLVAIWELKKDVYVVELDWYPDAPGEMVVLTCDTPEEDGITWTLDQSSEVLGSGKTLTIQVKEFGDAGQYTCHKGGEVLSHSLLLLHKKEDGIWSTDILKDQKEPKNKTFLRCEAKNYSGRFTCWWLTTISTDLTFSVKSSRGSSDPQGVTCGAATLSAERVRGDNKEYEYSVECQEDSACPAAEESLPIEVMVDAVHKLKYENYTSSFFIRDIIKPDPPKNLQLKPLKNSRQVEVSWEYPDTWSTPHSYFSLTFCVQVQGKSKREKKDRVFTDKTSATVICRKNASISVRAQDRYYSSSWSEWASVPCSGGGGSGGGGSGGGGSRNLPVATPDPGMFPCLHHSQNLLRAVSNMLQKARQTLEFYPCTSEEIDHEDITKDKTSTVEACLPLELTKNESCLNSRETSFITNGSCLASRKTSFMMALCLSSIYEDLKMYQVEFKTMNAKLLMDPKRQIFLDQNMLAVIDELMQALNFNSETVPQKSSLEEPDFYKTKIKLCILLHAFRIRAVTIDRVMSYLNASGGSGGVQVETISPGDGRTFPKRGQTCVVHYTGMLGDGKKVDSSRDRNKPFKFMLGKQEVIRGWEEGVAQMSVGQGAKLTISPDYAYGATGHPGIIPPHATLVFDVELLELE

SEQ ID NO: 566 - protein, 540 aa, Artificial Sequence
  Description of Artificial Sequence: Synthetic Construct
MCHQQLVISWFSLVFLASPLVAIWELKKDVYVVELDWYPDAPGEMVVLTCDTPEEDGITWTLDQSSEVLGSGKTLTIQVKEFGDAGQYTCHKGGEVLSHSLLLLHKKEDGIWSTDILKDQKEPKNKTFLRCEAKNYSGRFTCWWLTTISTDLTFSVKSSRGSSDPQGVTCGAATLSAERVRGDNKEYEYSVECQEDSACPAAEESLPIEVMVDAVHKLKYENYTSSFFIRDIIKPDPPKNLQLKPLKNSRQVEVSWEYPDTWSTPHSYFSLTFCVQVQGKSKREKKDRVFTDKTSATVICRKNASISVRAQDRYYSSSWSEWASVPCSGGGGSGGGGSGGGGSRNLPVATPDPGMFPCLHHSQNLLRAVSNMLQKARQTLEFYPCTSEEIDHEDITKDKTSTVEACLPLELTKNESCLNSRETSFITNGSCLASRKTSFMMALCLSSIYEDLKMYQVEFKTMNAKLLMDPKRQIFLDQNMLAVIDELMQALNFNSETVPQKSSLEEPDFYKTKIKLCILLHAFRIRAVTIDRVMSYLNAS

SEQ ID NO: 567 - DNA, 66 bp, Homo sapiens
atgtgtcaccagcagttggtcatctcttggttttccctggtttttctggcatctcccctcgtggcc

SEQ ID NO: 568 - DNA, 66 bp, Artificial Sequence
  Description of Artificial Sequence: Synthetic Signal Sequence
atgtgccaccagcagctggtcatcagctggttctccctggtgtttctggcatcccctctggtggca

SEQ ID NO: 569 - DNA, 66 bp, Artificial Sequence
  Description of Artificial Sequence: Synthetic Signal Sequence
atgtgccaccagcagctggtcatcagctggttctccctggtgtttctggccagccctctggtggcc

SEQ ID NO: 570 - DNA, 66 bp, Artificial Sequence
  Description of Artificial Sequence: Synthetic Signal Sequence
atgtgccaccagcagctggtcatcagctggttctccctggtgtttctggcaagccctctggtggca

SEQ ID NO: 571 - DNA, 66 bp, Artificial Sequence
  Description of Artificial Sequence: Synthetic Signal Sequence
atgtgccaccagcagctggtcatcagctggttctccctggtgtttctggcatccccactggtggca

SEQ ID NO: 572 - DNA, 66 bp, Artificial Sequence
  Description of Artificial Sequence: Synthetic Signal Sequence
atgtgccaccaacagctcgtgatcagctggttctccctggtgttcctggctagccccctggtggcc

SEQ ID NO: 573 - DNA, 66 bp, Artificial Sequence
  Description of Artificial Sequence: Synthetic Signal Sequence
atgtgccaccagcagctggtcatctcttggttcagcctggtgtttctggcctcccccctggtggcc

SEQ ID NO: 574 - DNA, 66 bp, Artificial Sequence
  Description of Artificial Sequence: Synthetic Signal Sequence
atgtgccaccagcagctggtcatctcctggttctctctggtgtttctggcatctcctctggtggca

SEQ ID NO: 575 - DNA, 66 bp, Artificial Sequence
  Description of Artificial Sequence: Synthetic Signal Sequence
atgtgccaccagcagctggtcatctcttggttcagcctggtgtttctggcatccccactggtggca

SEQ ID NO: 576 - protein, 19 aa, Artificial Sequence
  Description of Artificial Sequence: Synthetic Spacer
ATNFSLLKQAGDVEENPGP

SEQ ID NO: 577 - DNA, 57 bp, Artificial Sequence
  Description of Artificial Sequence: Synthetic Spacer
gcaaccaattttagtctacttaaacaagcaggtgatgtagaagaaaatccaggtcca

SEQ ID NO: 578 - protein, 306 aa, Artificial Sequence
  Description of Artificial Sequence: Synthetic Payload sequence
IWELKKDVYVVELDWYPDAPGEMVVLTCDTPEEDGITWTLDQSSEVLGSGKTLTIQVKEFGDAGQYTCHKGGEVLSHSLLLLHKKEDGIWSTDILKDQKEPKNKTFLRCEAKNYSGRFTCWWLTTISTDLTFSVKSSRGSSDPQGVTCGAATLSAERVRGDNKEYEYSVECQEDSACPAAEESLPIEVMVDAVHKLKYENYTSSFFIRDIIKPDPPNNLQLKPLKNSRQVEVSWEYPDTWSTPHSYFSLTFCVQVQGKSKREKKDRVFTDKTSATVICRKNASISVRAQDRYYSSSWSEWASVPCS

SEQ ID NO: 579 - DNA, 918 bp, Artificial Sequence
  Description of Artificial Sequence: Synthetic Payload sequence
atatgggaactgaagaaagatgtttatgtcgtagaattggattggtatccggatgcccctggagaaatggtggtcctcacctgtgacacccctgaagaagatggtatcacctggaccttggaccagagcagtgaggtcttaggctctggcaaaaccctgaccatccaagtcaaagagtttggagatgctggccagtacacctgtcacaaaggaggcgaggttctaagccattcgctcctgctgcttcacaaaaaggaagatggaatttggtccactgatattttaaaggaccagaaagaacccaaaaataagacctttctaagatgcgaggccaagaattattctggacgtttcacctgctggtggctgacgacaatcagtactgatttgacattcagtgtcaaaagcagcagaggctcttctgacccccaaggggtgacgtgcggagctgctacactctctgcagagagagtcagaggggacaacaaggagtatgagtactcagtggagtgccaggaggacagtgcctgcccagctgctgaggagagtctgcccattgaggtcatggtggatgccgttcacaagctcaagtatgaaaactacaccagcagcttcttcatcagggacatcatcaaacctgacccacccaacaacttgcagctgaagccattaaagaattctcggcaggtggaggtcagctgggagtaccctgacacctggagtactccacattcctacttctccctgacattctgcgttcaggtccagggcaagagcaagagagaaaagaaagatagagtcttcaccgacaagacctcagccacggtcatctgccgcaaaaatgccagcattagcgtgcgggcccaggaccgctactatagctcatcttggagcgaatgggcatctgtgccctgcagt

SEQ ID NO: 580 - DNA, 432 bp, Artificial Sequence
  Description of Artificial Sequence: Synthetic polynucleotide
atggactggacatggatactcttcctggtagcagccgccacacgagtgcacagctacccatacgatgttccagattacgctaactgggtgaacgtgatctccgacctgaaaaagatcgaggatttgatccagagcatgcacattgacgccaccctgtataccgagtccgacgtgcacccgagttgcaaggtgactgccatgaagtgcttcctgctggagctgcaagtgatcagcctggagagcggcgacgccagcatccacgacaccgtggaaaaccttatcattctggccaacaatagcctgagcagcaacggcaacgtgaccgaaagcggatgtaaggaatgcgaggaactggaagagaagaatatcaaagaattcctgcaaagcttcgtgcacatcgtgcagatgttcatcaacacttctggatcctga

SEQ ID NO: 581 - DNA, 27 bp, Homo sapiens
agcgccaggaatcgccagaagcggtcc

SEQ ID NO: 582 - DNA, 24 bp, Homo sapiens
gcccggaatagacagaagagatct

SEQ ID NO: 583 - DNA, 921 bp, Artificial Sequence
  Description of Artificial Sequence: Synthetic Payload sequence
atatgggaactgaagaaagatgtttatgtcgtagaattggattggtatccggatgcccctggagaaatggtggtcctcacctgtgacacccctgaagaagatggtatcacctggaccttggaccagagcagtgaggtcttaggctctggcaaaaccctgaccatccaagtcaaagagtttggagatgctggccagtacacctgtcacaaaggaggcgaggttctaagccattcgctcctgctgcttcacaaaaaggaagatggaatttggtccactgatattttaaaggaccagaaagaacccaaaaataagacctttctaagatgcgaggccaagaattattctggacgtttcacctgctggtggctgacgacaatcagtactgatttgacattcagtgtcaaaagcagcagaggctcttctgacccccaaggggtgacgtgcggagctgctacactctctgcagagagagtcagaggggacaacaaggagtatgagtactcagtggagtgccaggaggacagtgcctgcccagctgctgaggagagtctgcccattgaggtcatggtggatgccgttcacaagctcaagtatgaaaactacaccagcagcttcttcatcagggacatcatcaaacctgacccacccaagaacttgcagctgaagccattaaagaattctcggcaggtggaggtcagctgggagtaccctgacacctggagtactccacattcctacttctccctgacattctgcgttcaggtccagggcaagagcaagagagaaaagaaagatagagtcttcacggacaagacctcagccacggtcatctgccgcaaaaatgccagcattagcgtgcgggcccaggaccgctactatagctcatcttggagcgaatgggcatctgtgccctgcagttag

SEQ ID NO: 584 - DNA, 918 bp, Artificial Sequence
  Description of Artificial Sequence: Synthetic Payload sequence
atctgggagctgaagaaggacgtgtacgtggtggagctggactggtatcccgatgcccctggcgagatggtggtgctgacctgcgacacacctgaggaggatggcatcacctggacactggatcagtctagcgaggtgctgggcagcggcaagaccctgacaatccaggtgaaggagttcggcgacgccggccagtacacatgtcacaagggcggcgaggtgctgtctcacagcctgctgctgctgcacaagaaggaggacggcatttggtccacagacatcctgaaggatcagaaggagccaaagaacaagaccttcctgcggtgcgaggccaagaattatagcggccggttcacctgttggtggctgaccacaatcagcaccgatctgacattttccgtgaagtcctctaggggcagctccgacccccagggcgtgacatgcggagcagccaccctgtccgccgagagggtgcgcggcgataacaaggagtacgagtattccgtggagtgccaggaggactctgcctgtccagcagcagaggagagcctgcctatcgaagtgatggtggatgccgtgcacaagctgaagtacgagaattatacatctagcttctttatccgggacatcatcaagcccgatccacccaagaacctgcagctgaagcctctgaagaattctagacaggtggaggtgagctgggagtacccagacacctggtccacaccccactcttatttcagcctgaccttttgcgtgcaggtgcagggcaagagcaagagggagaagaaggaccgcgtgttcaccgataagacatccgccaccgtgatctgtaggaagaacgcctccatctctgtgagggcccaggatcgctactattcctctagctggtccgagtgggcctctgtgccctgtagc

SEQ ID NO: 585 - DNA, 918 bp, Artificial Sequence
  Description of Artificial Sequence: Synthetic Payload sequence
atctgggagctgaagaaggacgtgtacgtggtggagctggactggtatcccgatgcccctggcgagatggtggtgctgacctgcgacacaccagaggaggatggcatcacctggacactggatcagtctagcgaggtgctgggcagcggcaagaccctgacaatccaggtgaaggagttcggcgacgccggccagtacacatgtcacaagggcggcgaggtgctgtctcacagcctgctgctgctgcacaagaaggaggacggcatttggtccacagacatcctgaaggatcagaaggagccaaagaacaagaccttcctgcggtgcgaggccaagaattatagcggccggttcacctgttggtggctgaccacaatcagcaccgatctgacattttccgtgaagtcctctaggggcagctccgacccccagggcgtgacatgcggagcagccaccctgtccgccgagagggtgcgcggcgataacaaggagtacgagtattccgtggagtgccaggaggactctgcctgtccagcagcagaggagagcctgcctatcgaagtgatggtggatgccgtgcacaagctgaagtacgagaattatacatctagcttctttatccgggacatcatcaagcccgatccacccaagaacctgcagctgaagcctctgaagaattctagacaggtggaggtgagctgggagtacccagacacctggtccacaccccactcttatttcagcctgaccttttgcgtgcaggtgcagggcaagtccaagagggagaagaaggaccgcgtgttcaccgataagacatctgccaccgtgatctgtaggaagaacgcctccatctctgtgagggcccaggatcgctactattcctctagctggtccgagtgggcctctgtgccctgtagc

SEQ ID NO: 586 - DNA, 918 bp, Artificial Sequence
  Description of Artificial Sequence: Synthetic Payload sequence
atctgggagctgaagaaggacgtgtacgtggtggagctggactggtatcccgatgcccctggcgagatggtggtgctgacctgcgacacacctgaggaggatggcatcacctggacactggatcagtctagcgaggtgctgggctccggcaagaccctgacaatccaggtgaaggagttcggcgacgccggccagtacacatgtcacaagggcggcgaggtgctgtctcacagcctgctgctgctgcacaagaaggaggacggcatctggtccacagacatcctgaaggatcagaaggagccaaagaacaagaccttcctgaggtgcgaggccaagaattatagcggccgctttacctgttggtggctgaccacaatcagcaccgatctgacattttccgtgaagtcctctaggggcagctccgacccccagggcgtgacatgcggagcagccaccctgtccgccgagcgggtgagaggcgataacaaggagtacgagtattccgtggagtgccaggaggactctgcctgtccagcagcagaggagagcctgcctatcgaagtgatggtggatgccgtgcacaagctgaagtacgagaattatacatctagcttctttatcagggacatcatcaagcccgatccacccaagaacctgcagctgaagcctctgaagaattctcgccaggtggaggtgagctgggagtacccagacacctggagcacaccccactcttatttcagcctgaccttttgcgtgcaggtgcagggcaagtctaagcgggagaagaaggacagagtgttcaccgataagacaagcgccaccgtgatctgtcggaagaacgcctccatctctgtgcgggcccaggatagatactattcctctagctggtccgagtgggcctctgtgccctgtagc

SEQ ID NO: 587 - DNA, 918 bp, Artificial Sequence
  Description of Artificial Sequence: Synthetic Payload sequence
atctgggagctgaagaaggacgtgtacgtggtggagctggactggtatcccgatgcccctggcgagatggtggtgctgacctgcgacacacctgaggaggatggcatcacctggacactggatcagagctccgaggtgctgggaagcggcaagaccctgacaatccaggtgaaggagttcggcgacgccggccagtacacatgtcacaagggcggcgaggtgctgtctcacagcctgctgctgctgcacaagaaggaggacggcatttggtccacagacatcctgaaggatcagaaggagccaaagaacaagaccttcctgaggtgcgaggccaagaattatagcggccgctttacctgttggtggctgaccacaatcagcaccgatctgacattttccgtgaagtctagcagaggctcctctgacccccagggcgtgacatgcggagcagccaccctgtccgccgagcgggtgagaggcgataacaaggagtacgagtattccgtggagtgccaggaggactctgcctgtcctgcagcagaggagagcctgccaatcgaagtgatggtggatgccgtgcacaagctgaagtacgagaattatacaagctccttctttatcagggacatcatcaagcctgatccccctaagaacctgcagctgaagccactgaagaattctcgccaggtggaggtgagctgggagtacccagacacctggtccacaccccactcttatttcagcctgaccttttgcgtgcaggtgcagggcaagagcaagagggagaagaaggaccgcgtgttcaccgataagacatccgccaccgtgatctgtcggaagaacgcctccatctctgtgcgggcccaggatagatactattctagctcctggtccgagtgggcctctgtgccctgtagc

SEQ ID NO: 588 - DNA, 918 bp, Artificial Sequence; identical to SEQ ID NO: 472
  Description of Artificial Sequence: Synthetic Payload sequence

SEQ ID NO: 589 - DNA, 918 bp, Artificial Sequence; identical to SEQ ID NO: 473
  Description of Artificial Sequence: Synthetic Payload sequence

SEQ ID NO: 590 - DNA, 918 bp, Artificial Sequence
  Description of Artificial Sequence: Synthetic Payload sequence
atctgggagctgaagaaggacgtgtacgtggtggagctggactggtatcccgatgcccctggcgagatggtggtgctgacctgcgacacacccgaggaggatggcatcacctggacactggatcagtctagcgaggtgctgggctccggcaagaccctgacaatccaggtgaaggagttcggcgacgccggccagtacacctgtcacaagggcggcgaggtgctgtcccactctctgctgctgctgcacaagaaggaggacggcatctggtctacagacatcctgaaggatcagaaggagcctaagaacaagaccttcctgcggtgcgaggccaagaattatagcggccggttcacctgttggtggctgaccacaatcagcaccgatctgacattttccgtgaagtcctctcggggcagctccgacccacagggagtgacatgcggagcagccaccctgtccgccgagagggtgcgcggcgataacaaggagtacgagtattccgtggagtgccaggaggactctgcctgtccagcagcagaggagagcctgccaatcgaagtgatggtggatgccgtgcacaagctgaagtacgagaattatacatctagcttctttatccgggacatcatcaagcccgatccccctaagaacctgcagctgaagcctctgaagaattctagacaggtggaggtgagctgggagtaccccgacacctggagcacacctcacagctatttctccctgaccttttgcgtgcaggtgcagggcaagtccaagagggagaagaaggaccgcgtgttcaccgataagacatctgccaccgtgatctgtcggaagaacgccagcatctccgtgagggcccaggatcgctactattcctctagctggtctgagtgggccagcgtgccctgttcc

SEQ ID NO: 591 - DNA, 918 bp, Artificial Sequence
  Description of Artificial Sequence: Synthetic Payload sequence
atctgggagctgaagaaggacgtgtacgtggtggagctggactggtatcctgatgccccaggcgagatggtggtgctgacatgcgacacccccgaggaggatggcatcacatggaccctggatcagtcctctgaggtgctgggctccggcaagacactgaccatccaggtgaaggagttcggcgacgccggccagtacacctgtcacaagggaggagaggtgctgagccactccctgctgctgctgcacaagaaggaggacggcatctggtccaccgacatcctgaaggatcagaaggagcccaagaacaagacattcctgagatgcgaggccaagaattatagcggcaggtttacctgttggtggctgacaaccatctccacagatctgaccttttctgtgaagagctcccggggctctagcgaccctcagggagtgacctgcggagcagccacactgtccgccgagcgggtgagaggcgataacaaggagtacgagtattccgtggagtgccaggaggactctgcctgtcctgcagcagaggagagcctgccaatcgaagtgatggtggatgccgtgcacaagctgaagtacgagaattatacctcctctttctttatcagagacatcatcaagccagatcctccaaagaacctgcagctgaagcccctgaagaatagcaggcaggtggaggtgtcctgggagtacccagacacatggagcaccccccacagctatttctccctgacattttgcgtgcaggtgcagggcaagtccaagcgcgagaagaaggaccgggtgttcacagataagacctctgccacagtgatctgtcgcaagaacgcctctatcagcgtgcgcgcccaggatcggtactatagctcctcttggtctgagtgggccagcgtgccttgttcc

SEQ ID NO: 592 - DNA, 918 bp, Artificial Sequence
  Description of Artificial Sequence: Synthetic Payload sequence
atctgggagctgaagaaggacgtgtacgtggtggagctggactggtatcccgatgcccctggcgagatggtggtgctgacctgcgacacacctgaggaggatggcatcacctggacactggatcagagctccgaggtgctgggcagcggcaagaccctgacaatccaggtgaaggagttcggcgacgccggccagtacacatgtcacaagggcggcgaggtgctgtctcacagcctgctgctgctgcacaagaaggaggacggcatctggtccacagacatcctgaaggatcagaaggagccaaagaacaagaccttcctgaggtgcgaggccaagaattattctggcaggttcacctgttggtggctgaccacaatcagcaccgatctgacattttccgtgaagtctagccggggctcctctgacccccagggagtgacatgcggagcagccaccctgtccgccgagagggtgagaggcgataacaaggagtacgagtattccgtggagtgccaggaggactctgcctgtcctgcagcagaggagagcctgccaatcgaagtgatggtggatgccgtgcacaagctgaagtacgagaattatacaagctccttctttatcagggacatcatcaagcctgatccccctaagaacctgcagctgaagccactgaagaattctagacaggtggaggtgagctgggagtacccagacacctggagcacaccccactcctatttctctctgaccttttgcgtgcaggtgcagggcaagagcaagagggagaagaaggacagagtgttcaccgataagacatccgccaccgtgatctgtcggaagaacgcctccatctctgtgcgggcccaggatcgctactattctagctcctggagcgagtgggcatccgtgccatgttct

SEQ ID NO: 593 - DNA, 594 bp, Artificial Sequence
  Description of Artificial Sequence: Synthetic Payload sequence
agaaacctccccgtggccactccagacccaggaatgttcccatgccttcaccactcccaaaacctgctgagggccgtcagcaacatgctccagaaggccagacaaactctagaattttacccttgcacttctgaagagattgatcatgaagatatcacaaaagataaaaccagcacagtggaggcctgtttaccattggaattaaccaagaatgagagttgcctaaattccagagagacctctttcataactaatgggagttgcctggcctccagaaagacctcttttatgatggccctgtgccttagtagtatttatgaagacttgaagatgtaccaggtggagttcaagaccatgaatgcaaagcttctgatggatcctaagaggcagatctttctagatcaaaacatgctggcagttattgatgagctgatgcaggccctgaatttcaacagtgagactgtgccacaaaaatcctcccttgaagaaccggatttttataaaactaaaatcaagctctgcatacttcttcatgctttcagaattcgggcagtgactattgatagagtgatgagctatctgaatgcttcctaa

SEQ ID NO: 594 - DNA, 594 bp, Artificial Sequence
  Description of Artificial Sequence: Synthetic Payload sequence
cgcaatctgccagtggccacccctgacccaggcatgttcccctgcctgcaccacagccagaacctgctgagggccgtgtccaatatgctgcagaaggcccgccagacactggagttttacccttgtacctctgaggagatcgaccacgaggatatcacaaaggataagaccagcacagtggaggcctgcctgccactggagctgaccaagaacgagtcctgtctgaacagccgggaaaccagcttcatcaccaacggctcctgcctggcctctcgcaagaccagcttcatgatggccctgtgcctgtcctctatctacgaggacctgaagatgtatcaggtggagttcaagaccatgaacgccaagctgctgatggaccctaagcggcagatctttctggatcagaatatgctggccgtgatcgacgagctgatgcaggccctgaacttcaatagcgagacagtgccacagaagagctccctggaggagcccgatttctacaagaccaagatcaagctgtgcatcctgctgcacgcctttcggatcagagccgtgaccatcgacagagtgatgtcctatctgaatgcctcttga

SEQ ID NO: 595 - DNA, 594 bp, Artificial Sequence
  Description of Artificial Sequence: Synthetic Payload sequence
cgcaatctgccagtggccacccctgacccaggcatgttcccctgcctgcaccacagccagaacctgctgagggccgtgtccaatatgctgcagaaggcccgccagacactggagttttacccttgtaccagcgaggagatcgaccacgaggatatcacaaaggataagacctccacagtggaggcctgcctgccactggagctgaccaagaacgagtcctgtctgaacagccgggaaaccagcttcatcaccaacggctcctgcctggcctctcgcaagaccagcttcatgatggccctgtgcctgtcctctatctacgaggacctgaagatgtatcaggtggagttcaagaccatgaacgccaagctgctgatggaccctaagcggcagatctttctggatcagaatatgctggccgtgatcgacgagctgatgcaggccctgaacttcaatagcgagacagtgccacagaagagctccctggaggagcccgatttctacaagaccaagatcaagctgtgcatcctgctgcacgcctttcggatcagagccgtgaccatcgacagagtgatgtcctatctgaatgcctcttga

SEQ ID NO: 596 - DNA, 594 bp, Artificial Sequence
  Description of Artificial Sequence: Synthetic Payload sequence
agaaatctgccagtggccacccctgacccaggcatgttcccctgcctgcaccactctcagaacctgctgcgggccgtgagcaatatgctgcagaaggccagacagacactggagttttacccttgtacctccgaggagatcgaccacgaggatatcacaaaggataagacctctacagtggaggcctgcctgccactggagctgaccaagaacgagtcctgtctgaacagccgggaaaccagcttcatcaccaacggctcctgcctggcctctagaaagaccagcttcatgatggccctgtgcctgtcctctatctacgaggacctgaagatgtatcaggtggagttcaagaccatgaacgccaagctgctgatggaccctaagaggcagatctttctggatcagaatatgctggccgtgatcgacgagctgatgcaggccctgaacttcaatagcgagacagtgccacagaagagctccctggaggagcccgatttctacaagaccaagatcaagctgtgcatcctgctgcacgcctttaggatccgcgccgtgaccatcgaccgcgtgatgtcctatctgaatgcctcttga

SEQ ID NO: 597 - DNA, 591 bp, Artificial Sequence
  Description of Artificial Sequence: Synthetic Payload sequence
agaaatctgccagtggcaacccctgacccaggaatgttcccttgcctgcaccacagccagaacctgctgcgggccgtgtccaatatgctgcagaaggccagacagacactggagttttacccttgtacctctgaggagatcgaccacgaggatatcacaaaggataagaccagcacagtggaggcctgcctgccactggagctgaccaagaacgagtcctgtctgaacagccgggaaaccagcttcatcaccaacggctcctgcctggcctctcgcaagaccagcttcatgatggccctgtgcctgtctagcatctacgaggacctgaagatgtatcaggtggagttcaagaccatgaacgccaagctgctgatggaccctaagaggcagatctttctggatcagaatatgctggccgtgatcgacgagctgatgcaggccctgaacttcaatagcgagacagtgccacagaagtcctctctggaggagcccgatttctacaagaccaagatcaagctgtgcatcctgctgcacgcctttaggatccgcgccgtgaccatcgacagagtgatgtcctatctgaacgcctct

SEQ ID NO: 598 - DNA, 591 bp, Artificial Sequence
  Description of Artificial Sequence: Synthetic Payload sequence
agaaatctgccagtggcaacccctgacccaggaatgttcccttgcctgcaccacagccagaacctgctgagggccgtgtccaatatgctgcagaaggcccgccagacactggagttttacccttgtaccagcgaggagatcgaccacgaggatatcacaaaggataagacctccacagtggaggcctgcctgccactggagctgaccaagaacgagagctgtctgaattcccgggagacatctttcatcaccaacggcagctgcctggcctccagaaagacatcttttatgatggccctgtgcctgtctagcatctacgaggacctgaagatgtatcaggtggagttcaagaccatgaacgccaagctgctgatggaccctaagaggcagatctttctggatcagaatatgctggccgtgatcgacgagctgatgcaggccctgaacttcaatagcgagacagtgccacagaagtcctctctggaggagcccgatttctacaagaccaagatcaagctgtgcatcctgctgcacgcctttaggatccgcgccgtgaccatcgaccgcgtgatgtcttatctgaacgcatcc

SEQ ID NO: 599 - DNA, 594 bp, Artificial Sequence
  Description of Artificial Sequence: Synthetic Payload sequence
agaaacctgcctgtcgctacccccgaccccggaatgttcccctgcctgcaccactcccagaacctcctgagggccgtgtccaacatgctgcagaaggctagacagaccctcgaattctacccctgtaccagcgaggagatcgaccatgaggacatcaccaaggataagaccagcaccgtggaggcttgcctgcctctggagctgaccaaaaacgagagctgcctgaacagcagggaaaccagcttcattaccaacggctcctgcctggcctccaggaagacatccttcatgatggccctgtgcctcagcagcatctacgaggacctgaagatgtatcaggtggagtttaagaccatgaatgccaagctgctgatggaccctaagaggcagatcttcctggaccagaatatgctggccgtgattgacgagctgatgcaggccctcaactttaacagcgagaccgtgccccagaaaagcagcctcgaagagcctgacttctacaaaaccaagattaagctgtgtatcctgctgcacgccttcaggatcagggccgtgaccatcgacagggtgatgagctacctgaacgccagctaa

SEQ ID NO: 600 - DNA, 597 bp, Artificial Sequence
  Description of Artificial Sequence: Synthetic Payload sequence
agaaatctgccagtggccacccctgacccaggcatgttcccctgcctgcaccacagccagaacctgctgagggccgtgtccaatatgctgcagaaggcccgccagacactggagttttacccctgtaccagcgaggagatcgaccacgaggatatcacaaaggataagacctccacagtggaggcctgcctgcctctggagctgaccaagaacgagtcttgtctgaatagcagggagacatccttcatcaccaacggctcttgcctggccagccgcaagacatcctttatgatggccctgtgcctgtcctctatctacgaggacctgaagatgtatcaggtggagttcaagaccatgaacgccaagctgctgatggaccctaagaggcagatctttctggatcagaatatgctggccgtgatcgacgagctgatgcaggccctgaacttcaattccgagacagtgcctcagaagagctccctggaggagccagatttctacaagaccaagatcaagctgtgcatcctgctgcacgcctttcggatcagagccgtgaccatcgaccgcgtgatgtcttatctgaatgccagcggatcc

SEQ ID NO: 601 - DNA, 597 bp, Artificial Sequence
  Description of Artificial Sequence: Synthetic Payload sequence
cggaatctgcctgtggcaacccccgaccctggaatgttcccatgcctgcaccacagccagaacctgctgcgcgccgtgtccaatatgctgcagaaggcccggcagaccctggagttttacccatgtacaagcgaggagatcgaccacgaggatatcaccaaggataagacatccaccgtggaggcatgcctgccactggagctgacaaagaacgagtcttgtctgaacagccgggagacaagcttcatcacaaacggctcttgcctggccagccggaagacctcctttatgatggccctgtgcctgagctccatctacgaggacctgaagatgtatcaggtggagttcaagacaatgaacgccaagctgctgatggaccccaagcgccagatctttctggatcagaatatgctggccgtgatcgacgagctgatgcaggccctgaactttaatagcgagacagtgccccagaagtctagcctggaggagcctgatttctacaagacaaagatcaagctgtgcatcctgctgcacgccttccggatcagagccgtgaccatcgacagagtgatgtcttatctgaatgccagcggatcc

SEQ ID NO: 602 - DNA, 591 bp, Artificial Sequence
  Description of Artificial Sequence: Synthetic Payload sequence
cgcaatctgccagtggcaacccctgacccaggaatgttcccttgcctgcaccacagccagaacctgctgcgggccgtgtccaatatgctgcagaaggcccgccagacactggagttttacccttgtacctctgaggagatcgaccacgaggatatcacaaaggataagaccagcacagtggaggcctgcctgccactggagctgaccaagaacgagagctgtctgaattccagggagacatctttcatcaccaacggcagctgcctggcctccagaaagacatcttttatgatggccctgtgcctgtctagcatctacgaggacctgaagatgtatcaggtggagttcaagaccatgaacgccaagctgctgatggaccctaagaggcagatctttctggatcagaatatgctggccgtgatcgacgagctgatgcaggccctgaacttcaattccgagacagtgccacagaagtcctctctggaggagcccgatttctacaagaccaagatcaagctgtgcatcctgctgcacgccttcaggatcagggccgtgaccatcgacagagtgatgagctatctgaacgccagc

SEQ ID NO: 603 - DNA, 477 bp, Artificial Sequence
  Description of Artificial Sequence: Synthetic Destabilizing Domain (DD)
atctctctgattgcggcgctggcagttgactacgttattggcatggaaaacgcgatgccatggaacctcccggctgacctggcgtggttcaaacgtaacaccctgaacaaacctgtgatcatgggtcgtcacacctgggaatctattggccgtcctctcccgggtcgtaaaaacatcattctgtcttctcagccaggcaccgacgaccgtgttacctgggttaaaagcgttgacgaagcgattgctgcgtgcggtgatgttcctgaaattatggtgatcggcggtggccgtgttatcgaacagttcctgccgaaagcgcagaaactgtacctgacccacatcgacgcggaagttgaaggtgacacccacttcccggactacgaaccggatgattgggagagcgtattctccgaattccatgatgcggatgcgcaaaactctcattcttactgttttgaaatcctggaacgtcgttga

SEQ ID NO: 604 - DNA, 558 bp, Artificial Sequence
  Description of Artificial Sequence: Synthetic Destabilizing Domain (DD)
gtgggcagcctgaactgtatcgtggccgtgtcccagaacatgggcatcggcaagaatggcgatctgccatggccccctctgcggaacgagttcagatacttctttaggatgaccacaaccagctccgtggagggcaagcagaacctggtcatcatgggcaagaagacctggttttctatccccgagaagaacagacctctgaagggcaggatcaatctggtgctgagcagagagctgaaggagccaccacagggagcacacttcctgagccggagcctggacgatgccctgaagctgacagagcagccagagctggccaacaaggtggacatggtgtggatcgtgggcggctctagcgtgatcaaggagtttatgaatcaccccggccacctgaagctgttcgtgaccagaatcatgcaggactttgagtccgatacattctttcctgagatcgatctggagaagtacaagctgctgccagagtatcccggcgtgctgtctgacgtgcaggaggagaagggcatcaagtacaagttcgaggtgtatgagaagaacgat

SEQ ID NO: 605 - DNA, 1959 bp, Artificial Sequence
  Description of Artificial Sequence: Synthetic Construct
atgtgccaccagcagctggtcatcagctggttctccctggtgtttctggcatcccctctggtggcaggagtgcaggtggagacaatctctcctggcgatggccggaccttcccaaagagaggccagacatgcgtggtgcactacaccggcatgctggaggacggcaagaaggtggacagctcccgggatagaaacaagccattcaagtttatgctgggcaagcaggaagtgatcaggggatgggaggagggagtggcacagatgtctgtgggccagagagccaagctgacaatcagccctgattacgcatatggagcaaccggacacccaggaatcatcccacctcacgccaccctggtgtttgatgtggagctgctgaagccagagggaggatccggaggcatctgggagctgaagaaggacgtgtacgtggtggagctggactggtatcccgatgcccctggcgagatggtggtgctgacctgcgacacacctgaggaggatggcatcacctggacactggatcagtctagcgaggtgctgggcagcggcaagaccctgacaatccaggtgaaggagttcggcgacgccggccagtacacatgtcacaagggcggcgaggtgctgtctcacagcctgctgctgctgcacaagaaggaggacggcatttggtccacagacatcctgaaggatcagaaggagccaaagaacaagaccttcctgcggtgcgaggccaagaattatagcggccggttcacctgttggtggctgaccacaatcagcaccgatctgacattttccgtgaagtcctctaggggcagctccgacccccagggcgtgacatgcggagcagccaccctgtccgccgagagggtgcgcggcgataacaaggagtacgagtattccgtggagtgccaggaggactctgcctgtccagcagcagaggagagcctgcctatcgaagtgatggtggatgccgtgcacaagctgaagtacgagaattatacatctagcttctttatccgggacatcatcaagcccgatccacccaagaacctgcagctgaagcctctgaagaattctagacaggtggaggtgagctgggagtacccagacacctggtccacaccccactcttatttcagcctgaccttttgcgtgcaggtgcagggcaagagcaagagggagaagaaggaccgcgtgttcaccgataagacatccgccaccgtgatctgtaggaagaacgcctccatctctgtgagggcccaggatcgctactattcctctagctggtccgagtgggcctctgtgccctgtagcggaggaggaggatccggaggaggaggatctggcggcggcggcagccgcaatctgccagtggccacccctgacccaggcatgttcccctgcctgcaccacagccagaacctgctgagggccgtgtccaatatgctgcagaaggcccgccagacactggagttttacccttgtacctctgaggagatcgaccacgaggatatcacaaaggataagaccagcacagtggaggcctgcctgccactggagctgaccaagaacgagtcctgtctgaacagccgggaaaccagcttcatcaccaacggctcctgcctggcctctcgcaagaccagcttcatgatggccctgtgcctgtcctctatctacgaggacctgaagatgtatcaggtggagttcaagaccatgaacgccaagctgctgatggaccctaagcggcagatctttctggatcagaatatgctggccgtgatcgacgagctgatgcaggccctgaacttcaatagcgagacagtgccacagaagagctccctggaggagcccgatttctacaagaccaagatcaagctgtgcatcctgctgcacgcctttcggatcagagccgtgaccatcgacagagtgatgtcctatctgaatgcctcttga

SEQ ID NO: 606 - DNA, 1962 bp, Artificial Sequence
  Description of Artificial Sequence: Synthetic Construct
atgggcgtgcaggtggagacaatctcccctggcgatggccggaccttcccaaagagaggccagacatgcgtggtgcactacaccggcatgctggaggacggcaagaaggtggacagctcccgggatagaaacaagcctttcaagtttatgctgggcaagcaggaagtgatcaggggatgggaggagggagtggcacagatgtctgtgggccagagagccaagctgacaatcagccctgattacgcatatggagcaaccggacacccaggaatcatcccacctcacgccaccctggtgtttgacgtggagctgctgaagccagagggaggatctggaggaatgtgccaccagcagctggtcatcagctggttctccctggtgtttctggccagccctctggtggccatctgggagctgaagaaggacgtgtacgtggtggagctggactggtatcccgatgcccctggcgagatggtggtgctgacctgcgacacaccagaggaggatggcatcacctggacactggatcagtctagcgaggtgctgggcagcggcaagaccctgacaatccaggtgaaggagttcggcgacgccggccagtacacatgtcacaagggcggcgaggtgctgtctcacagcctgctgctgctgcacaagaaggaggacggcatttggtccacagacatcctgaaggatcagaaggagccaaagaacaagaccttcctgcggtgcgaggccaagaattatagcggccggttcacctgttggtggctgaccacaatcagcaccgatctgacattttccgtgaagtcctctaggggcagctccgacccccagggcgtgacatgcggagcagccaccctgtccgccgagagggtgcgcggcgataacaaggagtacgagtattccgtggagtgccaggaggactctgcctgtccagcagcagaggagagcctgcctatcgaagtgatggtggatgccgtgcacaagctgaagtacgagaattatacatctagcttctttatccgggacatcatcaagcccgatccacccaagaacctgcagctgaagcctctgaagaattctagacaggtggaggtgagctgggagtacccagacacctggtccacaccccactcttatttcagcctgaccttttgcgtgcaggtgcagggcaagtccaagagggagaagaaggaccgcgtgttcaccgataagacatctgccaccgtgatctgtaggaagaacgcctccatctctgtgagggcccaggatcgctactattcctctagctggtccgagtgggcctctgtgccctgtagcggaggaggaggatccggaggaggaggatctggcggcggcggcagccgcaatctgccagtggccacccctgacccaggcatgttcccctgcctgcaccacagccagaacctgctgagggccgtgtccaatatgctgcagaaggcccgccagacactggagttttacccttgtaccagcgaggagatcgaccacgaggatatcacaaaggataagacctccacagtggaggcctgcctgccactggagctgaccaagaacgagtcctgtctgaacagccgggaaaccagcttcatcaccaacggctcctgcctggcctctcgcaagaccagcttcatgatggccctgtgcctgtcctctatctacgaggacctgaagatgtatcaggtggagttcaagaccatgaacgccaagctgctgatggaccctaagcggcagatctttctggatcagaatatgctggccgtgatcgacgagctgatgcaggccctgaacttcaatagcgagacagtgccacagaagagctccctggaggagcccgatttctacaagaccaagatcaagctgtgcatcctgctgcacgcctttcggatcagagccgtgaccatcgacagagtgatgtcctatctgaatgcctcttga

SEQ ID NO: 607 - DNA, 1971 bp, Artificial Sequence
  Description of Artificial Sequence: Synthetic Construct
atgtgccaccagcagctggtcatcagctggttctccctggtgtttctggcaagccctctggtggcaggagtgcaggtggagacaatctcccctggcgatggcaggaccttcccaaagcgcggccagacatgcgtggtgcactacaccggcatgctggaggacggcaagaaggtggacagctcccgggatagaaacaagccattcaagtttatgctgggcaagcaggaagtgatcaggggatgggaggagggagtggcacagatgtccgtgggacagcgcgccaagctgacaatctctcctgattacgcatatggagcaaccggacacccaggaatcatcccacctcacgccaccctggtgtttgacgtggagctgctgaagcccgagagcgccaggaatcgccagaagcggtccatctgggagctgaagaaggacgtgtacgtggtggagctggactggtatcccgatgcccctggcgagatggtggtgctgacctgcgacacacctgaggaggatggcatcacctggacactggatcagtctagcgaggtgctgggctccggcaagaccctgacaatccaggtgaaggagttcggcgacgccggccagtacacatgtcacaagggcggcgaggtgctgtctcacagcctgctgctgctgcacaagaaggaggacggcatctggtccacagacatcctgaaggatcagaaggagccaaagaacaagaccttcctgaggtgcgaggccaagaattatagcggccgctttacctgttggtggctgaccacaatcagcaccgatctgacattttccgtgaagtcctctaggggcagctccgacccccagggcgtgacatgcggagcagccaccctgtccgccgagcgggtgagaggcgataacaaggagtacgagtattccgtggagtgccaggaggactctgcctgtccagcagcagaggagagcctgcctatcgaagtgatggtggatgccgtgcacaagctgaagtacgagaattatacatctagcttctttatcagggacatcatcaagcccgatccacccaagaacctgcagctgaagcctctgaagaattctcgccaggtggaggtgagctgggagtacccagacacctggagcacaccccactcttatttcagcctgaccttttgcgtgcaggtgcagggcaagtctaagcgggagaagaaggacagagtgttcaccgataagacaagcgccaccgtgatctgtcggaagaacgcctccatctctgtgcgggcccaggatagatactattcctctagctggtccgagtgggcctctgtgccctgtagcggaggaggaggatccggaggaggaggatctggcggcggcggcagcagaaatctgccagtggccacccctgacccaggcatgttcccctgcctgcaccactctcagaacctgctgcgggccgtgagcaatatgctgcagaaggccagacagacactggagttttacccttgtacctccgaggagatcgaccacgaggatatcacaaaggataagacctctacagtggaggcctgcctgccactggagctgaccaagaacgagtcctgtctgaacagccgggaaaccagcttcatcaccaacggctcctgcctggcctctagaaagaccagcttcatgatggccctgtgcctgtcctctatctacgaggacctgaagatgtatcaggtggagttcaagaccatgaacgccaagctgctgatggaccctaagaggcagatctttctggatcagaatatgctggccgtgatcgacgagctgatgcaggccctgaacttcaatagcgagacagtgccacagaagagctccctggaggagcccgatttctacaagaccaagatcaagctgtgcatcctgctgcacgcctttaggatccgcgccgtgaccatcgaccgcgtgatgtcctatctgaatgcctcttga

SEQ ID NO: 608 - DNA, 1968 bp, Artificial Sequence
  Description of Artificial Sequence: Synthetic Construct
atgtgccaccagcagctggtcatcagctggttctccctggtgtttctggcatccccactggtggcaatctgggagctgaagaaggacgtgtacgtggtggagctggactggtatcccgatgcccctggcgagatggtggtgctgacctgcgacacacctgaggaggatggcatcacctggacactggatcagagctccgaggtgctgggaagcggcaagaccctgacaatccaggtgaaggagttcggcgacgccggccagtacacatgtcacaagggcggcgaggtgctgtctcacagcctgctgctgctgcacaagaaggaggacggcatttggtccacagacatcctgaaggatcagaaggagccaaagaacaagaccttcctgaggtgcgaggccaagaattatagcggccgctttacctgttggtggctgaccacaatcagcaccgatctgacattttccgtgaagtctagcagaggctcctctgacccccagggcgtgacatgcggagcagccaccctgtccgccgagcgggtgagaggcgataacaaggagtacgagtattccgtggagtgccaggaggactctgcctgtcctgcagcagaggagagcctgccaatcgaagtgatggtggatgccgtgcacaagctgaagtacgagaattatacaagctccttctttatcagggacatcatcaagcctgatccccctaagaacctgcagctgaagccactgaagaattctcgccaggtggaggtgagctgggagtacccagacacctggtccacaccccactcttatttcagcctgaccttttgcgtgcaggtgcagggcaagagcaagagggagaagaaggaccgcgtgttcaccgataagacatccgccaccgtgatctgtcggaagaacgcctccatctctgtgcgggcccaggatagatactattctagctcctggtccgagtgggcctctgtgccctgtagcggaggaggaggatccggaggaggaggatctggcggaggaggcagcagaaatctgccagtggcaacccctgacccaggaatgttcccttgcctgcaccacagccagaacctgctgcgggccgtgtccaatatgctgcagaaggccagacagacactggagttttacccttgtacctctgaggagatcgaccacgaggatatcacaaaggataagaccagcacagtggaggcctgcctgccactggagctgaccaagaacgagtcctgtctgaacagccgggaaaccagcttcatcaccaacggctcctgcctggcctctcgcaagaccagcttcatgatggccctgtgcctgtctagcatctacgaggacctgaagatgtatcaggtggagttcaagaccatgaacgccaagctgctgatggaccctaagaggcagatctttctggatcagaatatgctggccgtgatcgacgagctgatgcaggccctgaacttcaatagcgagacagtgccacagaagtcctctctggaggagcccgatttctacaagaccaagatcaagctgtgcatcctgctgcacgcctttaggatccgcgccgtgaccatcgacagagtgatgtcctatctgaacgcctctgcccggaatagacagaagagatctggcgtgcaggtggagacaatcagccccggcgatggccggacctttcctaagagaggccagacatgcgtggtgcactacaccggcatgctgggcgacggcaagaaggtggacagctccagggatcgcaataagcccttcaagtttatgctgggcaagcaggaagtgatcaggggatgggaggagggagtggcacagatgtccgtgggacagggcgccaagctgacaatctctccagattacgcatatggagcaaccggacacccaggaatcatcccaccccacgccaccctggtgttcgacgtggagctgctggagctggagtga

SEQ ID NO: 609 - DNA, 1956 bp, Artificial Sequence
  Description of Artificial Sequence: Synthetic Construct
atgtgccaccagcagctggtcatcagctggttctccctggtgtttctggcatccccactggtggcaatctgggagctgaagaaggacgtgtacgtggtggagctggactggtatcccgatgcccctggcgagatggtggtgctgacctgcgacacacctgaggaggatggcatcacctggacactggatcagagctccgaggtgctgggaagcggcaagaccctgacaatccaggtgaaggagttcggcgacgccggccagtacacatgtcacaagggcggcgaggtgctgtctcacagcctgctgctgctgcacaagaaggaggacggcatttggtccacagacatcctgaaggatcagaaggagccaaagaacaagaccttcctgcggtgcgaggccaagaattatagcggccggttcacctgttggtggctgaccacaatcagcaccgatctgacattttccgtgaagtctagccggggctcctctgacccacagggagtgacatgcggagcagccaccctgtccgccgagcgggtgagaggcgataacaaggagtacgagtattccgtggagtgccaggaggactctgcctgtcctgcagcagaggagagcctgccaatcgaagtgatggtggatgccgtgcacaagctgaagtacgagaattatacaagctccttctttatcagggacatcatcaagcctgatccccctaagaacctgcagctgaagccactgaagaattctcgccaggtggaggtgagctgggagtacccagacacctggtccacaccccactcttatttcagcctgaccttttgcgtgcaggtgcagggcaagtccaagcgggagaagaaggacagagtgttcaccgataagacatctgccaccgtgatctgtcggaagaacgcctccatctctgtgagggcccaggatcgctactattctagctcctggagcgagtgggcatccgtgccatgttctggaggaggaggaagcggaggaggaggatccggcggaggaggctctagaaatctgccagtggcaacccctgacccaggaatgttcccttgcctgcaccacagccagaacctgctgagggccgtgtccaatatgctgcagaaggcccgccagacactggagttttacccttgtaccagcgaggagatcgaccacgaggatatcacaaaggataagacctccacagtggaggcctgcctgccactggagctgaccaagaacgagagctgtctgaattcccgggagacatctttcatcaccaacggcagctgcctggcctccagaaagacatcttttatgatggccctgtgcctgtctagcatctacgaggacctgaagatgtatcaggtggagttcaagaccatgaacgccaagctgctgatggaccctaagaggcagatctttctggatcagaatatgctggccgtgatcgacgagctgatgcaggccctgaacttcaatagcgagacagtgccacagaagtcctctctggaggagcccgatttctacaagaccaagatcaagctgtgcatcctgctgcacgcctttaggatccgcgccgtgaccatcgaccgcgtgatgtcttatctgaacgcatccggaggatctggaggagtgcaggtggagacaatcagccccggcgatggcaggacctttcctaagcgcggccagacatgcgtggtgcactacaccggcatgctgggcgacggcaagaaggtggacagctcccgggatagaaataagcccttcaagtttatgctgggcaagcaggaagtgatcagaggctgggaggagggagtggcacagatgtctgtgggacagggcgccaagctgacaatcagcccagattacgcatatggagcaaccggacacccaggaatcatcccaccccacgccaccctggtgttcgacgtggagctgctggagctggagtga

SEQ ID NO: 610 - DNA, 1623 bp, Artificial Sequence
  Description of Artificial Sequence: Synthetic Construct
atgtgccaccaacagctcgtgatcagctggttctccctggtgttcctggctagccccctggtggccatctgggagctcaagaaagacgtgtacgtggtggaactggactggtaccccgacgcccctggcgaaatggtggtgctgacatgcgacacccctgaggaggatggcattacctggaccctcgatcagagctccgaggtgctgggcagcggcaaaaccctgaccatccaggtgaaggagtttggcgatgccggccagtacacatgtcacaagggcggcgaggtgctgagccactccctgctgctgctccacaagaaggaagatggcatctggagcaccgacattctgaaggatcagaaggagcccaagaacaagacattcctgaggtgtgaggccaagaactacagcggcaggtttacctgctggtggctgacaacaatcagcaccgacctcacattctccgtcaagtcctccaggggttcttccgaccctcaaggcgtgacatgcggcgctgccaccctgagcgctgagagagtcaggggcgacaacaaggagtacgagtacagcgtcgaatgtcaggaggacagcgcctgtcccgccgctgaagagagcctgcctatcgaggtgatggtggacgccgtgcacaaactgaagtatgagaattacacctccagcttcttcatcagggacatcatcaaacccgatccccccaagaacctgcagctgaagcctctgaagaacagcagacaggtcgaagtgtcctgggagtaccctgatacctggtccacaccccacagctacttcagcctgaccttttgcgtgcaggtgcagggcaagagcaaaagggagaagaaggacagggtgtttaccgacaagacctccgccacagtgatttgcagaaagaacgcctccatcagcgtgagggcccaggacaggtattacagcagctcctggagcgaatgggctagcgtgccctgtagcggaggaggaggcagcggaggaggaggttctggaggaggcggcagcagaaacctgcctgtcgctacccccgaccccggaatgttcccctgcctgcaccactcccagaacctcctgagggccgtgtccaacatgctgcagaaggctagacagaccctcgaattctacccctgtaccagcgaggagatcgaccatgaggacatcaccaaggataagaccagcaccgtggaggcttgcctgcctctggagctgaccaaaaacgagagctgcctgaacagcagggaaaccagcttcattaccaacggctcctgcctggcctccaggaagacatccttcatgatggccctgtgcctcagcagcatctacgaggacctgaagatgtatcaggtggagtttaagaccatgaatgccaagctgctgatggaccctaagaggcagatcttcctggaccagaatatgctggccgtgattgacgagctgatgcaggccctcaactttaacagcgagaccgtgccccagaaaagcagcctcgaagagcctgacttctacaaaaccaagattaagctgtgtatcctgctgcacgccttcaggatcagggccgtgaccatcgacagggtgatgagctacctgaacgccagctaa

SEQ ID NO: 611 - DNA, 2130 bp, Artificial Sequence
  Description of Artificial Sequence: Synthetic Construct
atgtgccaccagcagctggtcatctcttggttcagcctggtgtttctggcctcccccctggtggccatctctctgatcgccgccctggccgtggattacgtgatcggcatggagaacgccatgccatggaatctgccagcagacctggcatggttcaagaggaacacactgaataagccagtgatcatgggcagacacacctgggagtccatcggccggccactgccaggcagaaagaacatcatcctgagctcccagcccggcacagacgatagggtgacctgggtgaagagcgtggacgaggcaatcgcagcatgcggcgatgtgcctgagatcatggtcatcggaggaggacgcgtgatcgagcagttcctgccaaaggcccagaagctgtacctgacacacatcgatgccgaggtggagggcgacacccactttcctgattatgagccagacgattgggagtccgtgttctctgagtttcacgacgccgatgcccagaactctcacagctattgttttgagatcctggagcggagagagtctaggcgcgtgcggagaaataagcggagcaagatctgggagctgaagaaggacgtgtacgtggtggagctggactggtatcccgatgcccctggcgagatggtggtgctgacctgcgacacacccgaggaggatggcatcacctggacactggatcagtctagcgaggtgctgggctccggcaagaccctgacaatccaggtgaaggagttcggcgacgccggccagtacacctgtcacaagggcggcgaggtgctgtcccactctctgctgctgctgcacaagaaggaggacggcatctggtctacagacatcctgaaggatcagaaggagcctaagaacaagaccttcctgcggtgcgaggccaagaattatagcggccggttcacctgttggtggctgaccacaatcagcaccgatctgacattttccgtgaagtcctctcggggcagctccgacccacagggagtgacatgcggagcagccaccctgtccgccgagagggtgcgcggcgataacaaggagtacgagtattccgtggagtgccaggaggactctgcctgtccagcagcagaggagagcctgccaatcgaagtgatggtggatgccgtgcacaagctgaagtacgagaattatacatctagcttctttatccgggacatcatcaagcccgatccccctaagaacctgcagctgaagcctctgaagaattctagacaggtggaggtgagctgggagtaccccgacacctggagcacacctcacagctatttctccctgaccttttgcgtgcaggtgcagggcaagtccaagagggagaagaaggaccgcgtgttcaccgataagacatctgccaccgtgatctgtcggaagaacgccagcatctccgtgagggcccaggatcgctactattcctctagctggtctgagtgggccagcgtgccctgttccggcggcggcggctctggaggaggaggcagcggcggaggaggctccagaaatctgccagtggccacccctgacccaggcatgttcccctgcctgcaccacagccagaacctgctgagggccgtgtccaatatgctgcagaaggcccgccagacactggagttttacccctgtaccagcgaggagatcgaccacgaggatatcacaaaggataagacctccacagtggaggcctgcctgcctctggagctgaccaagaacgagtcttgtctgaatagcagggagacatccttcatcaccaacggctcttgcctggccagccgcaagacatcctttatgatggccctgtgcctgtcctctatctacgaggacctgaagatgtatcaggtggagttcaagaccatgaacgccaagctgctgatggaccctaagaggcagatctttctggatcagaatatgctggccgtgatcgacgagctgatgcaggccctgaacttcaattccgagacagtgcctcagaagagctccctggaggagccagatttctacaagaccaagatcaagctgtgcatcctgctgcacgcctttcggatcagagccgtgaccatcgaccgcgtgatgtcttatctgaatgccagc

SEQ ID NO: 612 - DNA, 2214 bp, Artificial Sequence
  Description of Artificial Sequence: Synthetic Construct
atgtgccaccagcagctggtcatctcctggttctctctggtgtttctggcatctcctctggtggcagtgggcagcctgaactgtatcgtggccgtgtcccagaacatgggcatcggcaagaatggcgatctgccatggccccctctgcggaacgagttcagatacttctttaggatgaccacaaccagctccgtggagggcaagcagaacctggtcatcatgggcaagaagacctggttttctatccccgagaagaacagacctctgaagggcaggatcaatctggtgctgagcagagagctgaaggagccaccacagggagcacacttcctgagccggagcctggacgatgccctgaagctgacagagcagccagagctggccaacaaggtggacatggtgtggatcgtgggcggctctagcgtgatcaaggagtttatgaatcaccccggccacctgaagctgttcgtgaccagaatcatgcaggactttgagtccgatacattctttcctgagatcgatctggagaagtacaagctgctgccagagtatcccggcgtgctgtctgacgtgcaggaggagaagggcatcaagtacaagttcgaggtgtatgagaagaacgatgagtctcggagagtgaggcgcaataagaggagcaagatctgggagctgaagaaggacgtgtacgtggtggagctggactggtatcctgatgccccaggcgagatggtggtgctgacatgcgacacccccgaggaggatggcatcacatggaccctggatcagtcctctgaggtgctgggctccggcaagacactgaccatccaggtgaaggagttcggcgacgccggccagtacacctgtcacaagggaggagaggtgctgagccactccctgctgctgctgcacaagaaggaggacggcatctggtccaccgacatcctgaaggatcagaaggagcccaagaacaagacattcctgagatgcgaggccaagaattatagcggcaggtttacctgttggtggctgacaaccatctccacagatctgaccttttctgtgaagagctcccggggctctagcgaccctcagggagtgacctgcggagcagccacactgtccgccgagcgggtgagaggcgataacaaggagtacgagtattccgtggagtgccaggaggactctgcctgtcctgcagcagaggagagcctgccaatcgaagtgatggtggatgccgtgcacaagctgaagtacgagaattatacctcctctttctttatcagagacatcatcaagccagatcctccaaagaacctgcagctgaagcccctgaagaatagcaggcaggtggaggtgtcctgggagtacccagacacatggagcaccccccacagctatttctccctgacattttgcgtgcaggtgcagggcaagtccaagcgcgagaagaaggaccgggtgttcacagataagacctctgccacagtgatctgtcgcaagaacgcctctatcagcgtgcgcgcccaggatcggtactatagctcctcttggtctgagtgggccagcgtgccttgttccggcggcggcggctctggaggaggaggcagcggcggaggaggctcccggaatctgcctgtggcaacccccgaccctggaatgttcccatgcctgcaccacagccagaacctgctgcgcgccgtgtccaatatgctgcagaaggcccggcagaccctggagttttacccatgtacaagcgaggagatcgaccacgaggatatcaccaaggataagacatccaccgtggaggcatgcctgccactggagctgacaaagaacgagtcttgtctgaacagccgggagacaagcttcatcacaaacggctcttgcctggccagccggaagacctcctttatgatggccctgtgcctgagctccatctacgaggacctgaagatgtatcaggtggagttcaagacaatgaacgccaagctgctgatggaccccaagcgccagatctttctggatcagaatatgctggccgtgatcgacgagctgatgcaggccctgaactttaatagcgagacagtgccccagaagtctagcctggaggagcctgatttctacaagacaaagatcaagctgtgcatcctgctgcacgccttccggatcagagccgtgaccatcgacagagtgatgtcttatctgaatgccagc

SEQ ID NO: 613 - DNA, 1980 bp, Artificial Sequence
  Description of Artificial Sequence: Synthetic Construct
atgtgccaccagcagctggtcatctcttggttcagcctggtgtttctggcatccccactggtggcaatctgggagctgaagaaggacgtgtacgtggtggagctggactggtatcccgatgcccctggcgagatggtggtgctgacctgcgacacacctgaggaggatggcatcacctggacactggatcagagctccgaggtgctgggcagcggcaagaccctgacaatccaggtgaaggagttcggcgacgccggccagtacacatgtcacaagggcggcgaggtgctgtctcacagcctgctgctgctgcacaagaaggaggacggcatctggtccacagacatcctgaaggatcagaaggagccaaagaacaagaccttcctgaggtgcgaggccaagaattattctggcaggttcacctgttggtggctgaccacaatcagcaccgatctgacattttccgtgaagtctagccggggctcctctgacccccagggagtgacatgcggagcagccaccctgtccgccgagagggtgagaggcgataacaaggagtacgagtattccgtggagtgccaggaggactctgcctgtcctgcagcagaggagagcctgccaatcgaagtgatggtggatgccgtgcacaagctgaagtacgagaattatacaagctccttctttatcagggacatcatcaagcctgatccccctaagaacctgcagctgaagccactgaagaattctagacaggtggaggtgagctgggagtacccagacacctggagcacaccccactcctatttctctctgaccttttgcgtgcaggtgcagggcaagagcaagagggagaagaaggacagagtgttcaccgataagacatccgccaccgtgatctgtcggaagaacgcctccatctctgtgcgggcccaggatcgctactattctagctcctggagcgagtgggcatccgtgccatgttctggaggaggaggcagcggcggaggaggctccggcggcggcggctctcgcaatctgccagtggcaacccctgacccaggaatgttcccttgcctgcaccacagccagaacctgctgcgggccgtgtccaatatgctgcagaaggcccgccagacactggagttttacccttgtacctctgaggagatcgaccacgaggatatcacaaaggataagaccagcacagtggaggcctgcctgccactggagctgaccaagaacgagagctgtctgaattccagggagacatctttcatcaccaacggcagctgcctggcctccagaaagacatcttttatgatggccctgtgcctgtctagcatctacgaggacctgaagatgtatcaggtggagttcaagaccatgaacgccaagctgctgatggaccctaagaggcagatctttctggatcagaatatgctggccgtgatcgacgagctgatgcaggccctgaacttcaattccgagacagtgccacagaagtcctctctggaggagcccgatttctacaagaccaagatcaagctgtgcatcctgctgcacgccttcaggatcagggccgtgaccatcgacagagtgatgagctatctgaacgccagcgagtccaggagagtgcggcgcaacaagaggagcaagggcgtgcaggtggagacaatcagccccggcgatggccggacctttcctaagcgcggccagacatgcgtggtgcactacaccggcatgctgggcgacggcaagaaggtggacagctccagggatagaaacaagccattcaagtttatgctgggcaagcaggaagtgatcagaggatgggaggagggagtggcacagatgtccgtgggacagggcgccaagctgacaatctctccagattacgcatatggagcaaccggacacccaggaatcatcccaccccacgccaccctggtgttcgacgtggagctgctggagctggagtga

SEQ ID NO: 614 - protein, 20 aa, Homo sapiens
MYRMQLLSCIALSLALVTNS

SEQ ID NO: 615 - protein, 6 aa, Artificial Sequence
  Description of Artificial Sequence: Synthetic Linker
EFSTEF

SEQ ID NO: 616 - protein, 114 aa, Homo sapiens
NWVNVISDLKKIEDLIQSMHIDATLYTESDVHPSCKVTAMKCFLLELQVISLESGDASIHDTVENLIILANNSLSSNGNVTESGCKECEELEEKNIKEFLQSFVHIVQMFINTS

SEQ ID NO: 617 - DNA, 60 bp, Homo sapiens
atgtaccgaatgcaactgctgagctgcatcgccctgagcctggcactcgtgaccaacagc

SEQ ID NO: 618 - DNA, 60 bp, Artificial Sequence
  Description of Artificial Sequence: Synthetic Signal Sequence
atgtacaggatgcaactcctgtcttgcattgcactaagtcttgcacttgtcacaaacagt

SEQ ID NO: 619 - DNA, 60 bp, Artificial Sequence
  Description of Artificial Sequence: Synthetic Signal Sequence
atgtacaggatgcagctgctgagctgcatcgccctgagcctggccctggtgaccaacagc

SEQ ID NO: 620 - DNA, 60 bp, Artificial Sequence
  Description of Artificial Sequence: Synthetic Signal Sequence
atgtacagaatgcagctgctgagctgcatcgccctgtccctcgccctggtgaccaactcc

SEQ ID NO: 621 - DNA, 18 bp, Artificial Sequence
  Description of Artificial Sequence: Synthetic Linker
gagttcagcaccgagttt

SEQ ID NO: 622 - DNA, 18 bp, Artificial Sequence
  Description of Artificial Sequence: Synthetic Linker
gagttctccaccgagttc

SEQ ID NO: 623 - DNA, 345 bp, Homo sapiens
aactgggtgaatgtaataagtgatttgaaaaaaattgaagatcttattcaatctatgcatattgatgctactttatatacggaaagtgatgttcaccccagttgcaaagtaacagcaatgaagtgctttctcttggagttacaagttatttcacttgagtccggagatgcaagtattcatgatacagtagaaaatctgatcatcctagcaaacaacagtttgtcttctaatgggaatgtaacagaatctggatgcaaagaatgtgaggaactggaggaaaaaaatattaaagaatttttgcagagttttgtacatattgtccaaatgttcatcaacacttcttga

SEQ ID NO: 624 - DNA, 345 bp, Artificial Sequence
  Description of Artificial Sequence: Synthetic Construct
aactgggtgaacgtgatctccgacctgaagaagatcgaggacctgatccagtccatgcacatcgacgccaccctgtacaccgagagcgacgtgcaccctagctgcaaggtgaccgccatgaagtgcttcctgctggagctgcaggtgatcagcctggagagcggcgatgccagcatccacgacacagtggagaacctgatcatcctggccaacaacagcctgagcagcaacggcaatgtgaccgagagcggctgcaaggagtgcgaggagctggaggagaagaacatcaaggagttcctgcagtccttcgtgcacatcgtgcagatgttcatcaacaccagctaa

SEQ ID NO: 625 - DNA, 345 bp, Artificial Sequence
  Description of Artificial Sequence: Synthetic Construct
aactgggtcaacgtgatcagcgacctgaagaagatcgaggacctcatccagtccatgcacattgacgccaccctgtacaccgagtccgatgtgcaccctagctgcaaggtgaccgccatgaaatgcttcctgctggagctgcaggtcatctccttagaaagcggcgatgcctccatccacgacaccgtggagaacctgatcatcctggccaataactccctgagcagcaacggcaacgtgaccgagagcggctgcaaagagtgtgaagagctggaggagaagaacattaaggagttcctgcagagcttcgtgcacatcgtgcaaatgttcatcaacaccagctaa

SEQ ID NO: 626 - DNA, 342 bp, Artificial Sequence
  Description of Artificial Sequence: Synthetic Construct
aactgggtgaacgtgatctccgacctgaaaaagatcgaggatttgatccagagcatgcacattgacgccaccctgtataccgagtccgacgtgcacccgagttgcaaggtgactgccatgaagtgcttcctgctggagctgcaagtgatcagcctggagagcggcgacgccagcatccacgacaccgtggaaaaccttatcattctggccaacaatagcctgagcagcaacggcaacgtgaccgaaagcggatgtaaggaatgcgaggaactggaagagaagaatatcaaagaattcctgcaaagcttcgtgcacatcgtgcagatgttcatcaacacttct

SEQ ID NO: 627 - DNA, 477 bp, Artificial Sequence
  Description of Artificial Sequence: Synthetic Destabilizing Domain (DD)
atctctctgattgcggcgctggcagttgaccacgttattggcatggaaaacgcgatgccatggaacctcccggctgacctggcgtggttcaaacgtaacaccctgaacaaacctgtgatcatgggtcgtcacacctgggaatctattggccgtcctctcccgggtcgtaaaaacatcattctgtcttctcagccaggcaccgacgaccgtgttacctgggttaaaagcgttgacgaagcgattgctgcgtgcggtgatgttcctgaaattatggtgatcggcggtggccgtgtttacgaacagttcctgccgaaagcgcagaaactgtacctgacccacatcgacgcggaagttgaaggtgacacccacttcccggactacaaaccggatgattgggagagcgtattctccgaattccatgatgcggatgcgcaaaactctcattcttactgttttgaaatcctggaacgtcgttga

SEQ ID NO: 628 - DNA, 405 bp, Artificial Sequence
  Description of Artificial Sequence: Synthetic polynucleotide
atgtacaggatgcagctgctgagctgcatcgccctgagcctggccctggtgaccaacagcaactgggtgaacgtgatctccgacctgaagaagatcgaggacctgatccagtccatgcacatcgacgccaccctgtacaccgagagcgacgtgcaccctagctgcaaggtgaccgccatgaagtgcttcctgctggagctgcaggtgatcagcctggagagcggcgatgccagcatccacgacacagtggagaacctgatcatcctggccaacaacagcctgagcagcaacggcaatgtgaccgagagcggctgcaaggagtgcgaggagctggaggagaagaacatcaaggagttcctgcagtccttcgtgcacatcgtgcagatgttcatcaacaccagctaa

SEQ ID NO: 629 - DNA, 912 bp, Artificial Sequence
  Description of Artificial Sequence: Synthetic polynucleotide
atgtacagaatgcagctgctgagctgcatcgccctgtccctcgccctggtgaccaactccgagttctccaccgagttcatctccctgatcgccgccctggccgtggattatgtgatcggcatggagaacgccatgccctggaatctgcccgccgacctggcctggttcaagaggaataccctgaacaagcccgtcatcatgggcaggcacacctgggaaagcatcggcagacccctgcccggcaggaagaacatcatcctgtccagccagcccggcaccgacgacagagtgacctgggtgaagagcgtggacgaagctatcgccgcttgcggcgacgtgcccgagatcatggtgatcggcggcggcagggtgatcgaacagttcctgcccaaggcccagaagctgtacctgacccacatcgatgccgaggtggaaggcgatacacacttccccgattacgaacctgacgactgggaaagcgtgttttccgaattccacgacgccgacgcccagaacagccacagctactgcttcgagatcctggaaagaaggggaggctccggcggaaactgggtcaacgtgatcagcgacctgaagaagatcgaggacctcatccagtccatgcacattgacgccaccctgtacaccgagtccgatgtgcaccctagctgcaaggtgaccgccatgaaatgcttcctgctggagctgcaggtcatctccttagaaagcggcgatgcctccatccacgacaccgtggagaacctgatcatcctggccaataactccctgagcagcaacggcaacgtgaccgagagcggctgcaaagagtgtgaagagctggaggagaagaacattaaggagttcctgcagagcttcgtgcacatcgtgcaaatgttcatcaacaccagctaa

SEQ ID NO: 630 - protein, 18 aa, Homo sapiens
MDWTWILFLVAAATRVHS

SEQ ID NO: 631 - protein, 26 aa, Artificial Sequence
  Description of Artificial Sequence: Synthetic Linker
SGGGSGGGGSGGGGSGGGGSGGGSLQ

SEQ ID NO: 632 - protein, 237 aa, Homo sapiens
ITCPPPMSVEHADIWVKSYSLYSRERYICNSGFKRKAGTSSLTECVLNKATNVAHWTTPSLKCIRDPALVHQRPAPPSTVTTAGVTPQPESLSPSGKEPAASSPSSNNTAATTAAIVPGSQLMPSKSPSTGTTEISSHESSHGTPSQTTAKNWELTASASHQPPGVYPQGHSDTTVAISTSTVLLCGLSAVSLLACYLKSRQTPPLASVEMEAMEALPVTWGTSSRDEDLENCSHHL

SEQ ID NO: 633 - protein, 555 aa, Artificial Sequence
  Description of Artificial Sequence: Synthetic Construct
MDWTWILFLVAAATRVHSNWVNVISDLKKIEDLIQSMHIDATLYTESDVHPSCKVTAMKCFLLELQVISLESGDASIHDTVENLIILANNSLSSNGNVTESGCKECEELEEKNIKEFLQSFVHIVQMFINTSSGGGSGGGGSGGGGSGGGGSGGGSLQITCPPPMSVEHADIWVKSYSLYSRERYICNSGFKRKAGTSSLTECVLNKATNVAHWTTPSLKCIRDPALVHQRPAPPSTVTTAGVTPQPESLSPSGKEPAASSPSSNNTAATTAAIVPGSQLMPSKSPSTGTTEISSHESSHGTPSQTTAKNWELTASASHQPPGVYPQGHSDTTVAISTSTVLLCGLSAVSLLACYLKSRQTPPLASVEMEAMEALPVTWGTSSRDEDLENCSHHLSGISLIAALAVDHVIGMENAMPWNLPADLAWFKRNTLNKPVIMGRHTWESIGRPLPGRKNIILSSQPGTDDRVTWVKSVDEAIAACGDVPEIMVIGGGRVYEQFLPKAQKLYLTHIDAEVEGDTHFPDYKPDDWESVFSEFHDADAQNSHSYCFEILERR

SEQ ID NO: 634 - protein, 504 aa, Artificial Sequence
  Description of Artificial Sequence: Synthetic Construct
MDWTWILFLVAAATRVHSNWVNVISDLKKIEDLIQSMHIDATLYTESDVHPSCKVTAMKCFLLELQVISLESGDASIHDTVENLIILANNSLSSNGNVTESGCKECEELEEKNIKEFLQSFVHIVQMFINTSSGGGSGGGGSGGGGSGGGGSGGGSLQITCPPPMSVEHADIWVKSYSLYSRERYICNSGFKRKAGTSSLTECVLNKATNVAHWTTPSLKCIRDPALVHQRPAPPSTVTTAGVTPQPESLSPSGKEPAASSPSSNNTAATTAAIVPGSQLMPSKSPSTGTTEISSHESSHGTPSQTTAKNWELTASASHQPPGVYPQGHSDTTVAISTSTVLLCGLSAVSLLACYLKSRQTPPLASVEMEAMEALPVTWGTSSRDEDLENCSHHLSGGVQVETISPGDGRTFPKRGQTCVVHYTGMLGDGKKVDSSRDRNKPFKFMLGKQEVIRGWEEGVAQMSVGQGAKLTISPDYAYGATGHPGIIPPHATLVFDVELLELE

SEQ ID NO: 635 - protein, 395 aa, Artificial Sequence [sequence omitted]

SEQ ID NO: 636 - protein, 555 aa, Artificial Sequence
  Description of Artificial Sequence: Synthetic Construct
MDWTWILFLVAAATRVHSNWVNVISDLKKIEDLIQSMHIDATLYTESDVHPSCKVTAMKCFLLELQVISLESGDASIHDTVENLIILANNSLSSNGNVTESGCKECEELEEKNIKEFLQSFVHIVQMFINTSSGGGSGGGGSGGGGSGGGGSGGGSLQITCPPPMSVEHADIWVKSYSLYSRERYICNSGFKRKAGTSSLTECVLNKATNVAHWTTPSLKCIRDPALVHQRPAPPSTVTTAGVTPQPESLSPSGKEPAASSPSSNNTAATTAAIVPGSQLMPSKSPSTGTTEISSHESSHGTPSQTTAKNWELTASASHQPPGVYPQGHSDTTVAISTSTVLLCGLSAVSLLACYLKSRQTPPLASVEMEAMEALPVTWGTSSRDEDLENCSHHLSGISLIAALAVDYVIGMENAMPWNLPADLAWFKRNTLNKPVIMGRHTWESIGRPLPGRKNIILSSQPGTDDRVTWVKSVDEAIAACGDVPEIMVIGGGRVIEQFLPKAQKLYLTHIDAEVEGDTHFPDYEPDDWESVFSEFHDADAQNSHSYCFEILERR

SEQ ID NO: 637 - DNA, 54 bp, Homo sapiens
atggactggacatggatactcttcctggtagcagccgccacacgagtgcacagc

SEQ ID NO: 638 - DNA, 78 bp, Artificial Sequence
  Description of Artificial Sequence: Synthetic Linker
tcaggtggcggtagtggtgggggaggatctggaggcggaggaagcgggggtggaggttcaggaggagggagcttgcaa

SEQ ID NO: 639 - DNA, 714 bp, Homo sapiens
atcacgtgccctccccccatgtccgtggaacacgcagacatctgggtcaagagctacagcttgtactccagggagcggtacatttgtaactctggtttcaagcgtaaagccggcacgtccagcctgacggagtgcgtgttgaacaaggccacgaatgtcgcccactggacaacccccagtctcaaatgcattagagaccctgccctggttcaccaaaggccagcgccaccctccacagtaacgacggcaggggtgaccccacagccagagagcctctccccttctggaaaagagcccgcagcttcatctcccagctcaaacaacacagcggccacaacagcagctattgtcccgggctcccagctgatgccttcaaaatcaccttccacaggaaccacagagataagcagtcatgagtcctcccacggcaccccctctcagacaacagccaagaactgggaactcacagcatccgcctcccaccagccgccaggtgtgtatccacagggccacagcgacaccactgtggctatctccacgtccactgtcctgctgtgtgggctgagcgctgtgtctctcctggcatgctacctcaagtcaaggcaaactcccccgctggccagcgttgaaatggaagccatggaggctctgccggtgacttgggggaccagcagcagagatgaagacttggaaaactgctctcaccacctatga

SEQ ID NO: 640 - DNA, 711 bp, Artificial Sequence
  Description of Artificial Sequence: Synthetic Construct
attacctgcccccctccgatgagcgtggagcacgccgacatctgggtcaagagctacagcttgtatagtagggagcggtacatctgtaacagcgggttcaagaggaaggccgggaccagctcactgaccgagtgcgtgttgaacaaggccaccaacgtggcccactggaccacccctagccttaagtgcatcagggacccagcgctcgtacaccagagacccgcgcctccctctacggtaaccacggcaggcgtaaccccccagcccgagagcctgtccccgagcggcaaggagcctgcagcgagcagcccctcaagcaacaacacagccgctaccaccgcggcaatcgtgcccggcagccagctgatgccctcaaagagccccagcaccggcaccactgagataagcagccacgagagctcacacggcactccctcacagaccactgccaagaattgggagctgaccgcctctgccagccaccagcccccaggcgtgtatccccagggccacagcgacaccacggtcgccatcagcacatctacagtgcttttgtgcggccttagcgccgtgtcactgctggcatgctacttgaaaagtaggcaaactccccctcttgccagtgtggaaatggaggccatggaagccctgcccgtgacctggggcaccagttctagggacgaggaccttgagaactgctcacatcatttg

SEQ ID NO: 641 - DNA, 474 bp, Artificial Sequence
  Description of Artificial Sequence: Synthetic Destabilizing Domain (DD)
atctctctgattgcggcgctggcagttgactacgttattggcatggaaaacgcgatgccatggaacctcccggctgacctggcgtggttcaaacgtaacaccctgaacaaacctgtgatcatgggtcgtcacacctgggaatctattggccgtcctctcccgggtcgtaaaaacatcattctgtcttctcagccaggcaccgacgaccgtgttacctgggttaaaagcgttgacgaagcgattgctgcgtgcggtgatgttcctgaaattatggtgatcggcggtggccgtgttatcgaacagttcctgccgaaagcgcagaaactgtacctgacccacatcgacgcggaagttgaaggtgacacccacttcccggactacgaaccggatgattgggagagcgtattctccgaattccatgatgcggatgcgcaaaactctcattcttactgttttgaaatcctggaacgtcgt

SEQ ID NO: 642 - DNA, 474 bp, Artificial Sequence
  Description of Artificial Sequence: Synthetic Destabilizing Domain (DD)
atctctctgattgcggcgctggcagttgaccacgttattggcatggaaaacgcgatgccatggaacctcccggctgacctggcgtggttcaaacgtaacaccctgaacaaacctgtgatcatgggtcgtcacacctgggaatctattggccgtcctctcccgggtcgtaaaaacatcattctgtcttctcagccaggcaccgacgaccgtgttacctgggttaaaagcgttgacgaagcgattgctgcgtgcggtgatgttcctgaaattatggtgatcggcggtggccgtgtttacgaacagttcctgccgaaagcgcagaaactgtacctgacccacatcgacgcggaagttgaaggtgacacccacttcccggactacaaaccggatgattgggagagcgtattctccgaattccatgatgcggatgcgcaaaactctcattcttactgttttgaaatcctggaacgtcgt

SEQ ID NO: 643 - DNA, 1668 bp, Artificial Sequence
  Description of Artificial Sequence: Synthetic polynucleotide
atggactggacatggatactcttcctggtagcagccgccacacgagtgcacagcaactgggtgaacgtgatctccgacctgaaaaagatcgaggatttgatccagagcatgcacattgacgccaccctgtataccgagtccgacgtgcacccgagttgcaaggtgactgccatgaagtgcttcctgctggagctgcaagtgatcagcctggagagcggcgacgccagcatccacgacaccgtggaaaaccttatcattctggccaacaatagcctgagcagcaacggcaacgtgaccgaaagcggatgtaaggaatgcgaggaactggaagagaagaatatcaaagaattcctgcaaagcttcgtgcacatcgtgcagatgttcatcaacacttcttcaggtggcggtagtggtgggggaggatctggaggcggaggaagcgggggtggaggttcaggaggagggagcttgcaaattacctgcccccctccgatgagcgtggagcacgccgacatctgggtcaagagctacagcttgtatagtagggagcggtacatctgtaacagcgggttcaagaggaaggccgggaccagctcactgaccgagtgcgtgttgaacaaggccaccaacgtggcccactggaccacccctagccttaagtgcatcagggacccagcgctcgtacaccagagacccgcgcctccctctacggtaaccacggcaggcgtaaccccccagcccgagagcctgtccccgagcggcaaggagcctgcagcgagcagcccctcaagcaacaacacagccgctaccaccgcggcaatcgtgcccggcagccagctgatgccctcaaagagccccagcaccggcaccactgagataagcagccacgagagctcacacggcactccctcacagaccactgccaagaattgggagctgaccgcctctgccagccaccagcccccaggcgtgtatccccagggccacagcgacaccacggtcgccatcagcacatctacagtgcttttgtgcggccttagcgccgtgtcactgctggcatgctacttgaaaagtaggcaaactccccctcttgccagtgtggaaatggaggccatggaagccctgcccgtgacctggggcaccagttctagggacgaggaccttgagaactgctcacatcatttgagcggcatctctctgattgcggcgctggcagttgaccacgttattggcatggaaaacgcgatgccatggaacctcccggctgacctggcgtggttcaaacgtaacaccctgaacaaacctgtgatcatgggtcgtcacacctgggaatctattggccgtcctctcccgggtcgtaaaaacatcattctgtcttctcagccaggcaccgacgaccgtgttacctgggttaaaagcgttgacgaagcgattgctgcgtgcggtgatgttcctgaaattatggtgatcggcggtggccgtgtttacgaacagttcctgccgaaagcgcagaaactgtacctgacccacatcgacgcggaagttgaaggtgacacccacttcccggactacaaaccggatgattgggagagcgtattctccgaattccatgatgcggatgcgcaaaactctcattcttactgttttgaaatcctggaacgtcgttga

SEQ ID NO: 644 - DNA, 1515 bp, Artificial Sequence
  Description of Artificial Sequence: Synthetic polynucleotide
atggactggacatggatactcttcctggtagcagccgccacacgagtgcacagcaactgggtgaacgtgatctccgacctgaaaaagatcgaggatttgatccagagcatgcacattgacgccaccctgtataccgagtccgacgtgcacccgagttgcaaggtgactgccatgaagtgcttcctgctggagctgcaagtgatcagcctggagagcggcgacgccagcatccacgacaccgtggaaaaccttatcattctggccaacaatagcctgagcagcaacggcaacgtgaccgaaagcggatgtaaggaatgcgaggaactggaagagaagaatatcaaagaattcctgcaaagcttcgtgcacatcgtgcagatgttcatcaacacttcttcaggtggcggtagtggtgggggaggatctggaggcggaggaagcgggggtggaggttcaggaggagggagcttgcaaattacctgcccccctccgatgagcgtggagcacgccgacatctgggtcaagagctacagcttgtatagtagggagcggtacatctgtaacagcgggttcaagaggaaggccgggaccagctcactgaccgagtgcgtgttgaacaaggccaccaacgtggcccactggaccacccctagccttaagtgcatcagggacccagcgctcgtacaccagagacccgcgcctccctctacggtaaccacggcaggcgtaaccccccagcccgagagcctgtccccgagcggcaaggagcctgcagcgagcagcccctcaagcaacaacacagccgctaccaccgcggcaatcgtgcccggcagccagctgatgccctcaaagagccccagcaccggcaccactgagataagcagccacgagagctcacacggcactccctcacagaccactgccaagaattgggagctgaccgcctctgccagccaccagcccccaggcgtgtatccccagggccacagcgacaccacggtcgccatcagcacatctacagtgcttttgtgcggccttagcgccgtgtcactgctggcatgctacttgaaaagtaggcaaactccccctcttgccagtgtggaaatggaggccatggaagccctgcccgtgacctggggcaccagttctagggacgaggaccttgagaactgctcacatcatttgagcggcggcgtgcaggttgagactataagcccaggcgacggcaggaccttccccaagaggggccagacatgcgtggtgcactacaccggcatgcttggcgacggcaaaaaggtggactcaagcagggacaggaacaagcccttcaagttcatgttgggcaaacaggaggtgatcagaggctgggaggagggtgttgcccagatgagcgtggggcagggcgccaagctcacgataagtcccgattacgcctacggcgccaccggtcaccccggcatcatccccccacacgccaccctggtgttcgacgtggaattgctggagctggagtga

SEQ ID NO: 645 - DNA, 1188 bp, Artificial Sequence
  Description of Artificial Sequence: Synthetic polynucleotide
atggactggacatggatactcttcctggtagcagccgccacacgagtgcacagcaactgggtgaacgtgatctccgacctgaaaaagatcgaggatttgatccagagcatgcacattgacgccaccctgtataccgagtccgacgtgcacccgagttgcaaggtgactgccatgaagtgcttcctgctggagctgcaagtgatcagcctggagagcggcgacgccagcatccacgacaccgtggaaaaccttatcattctggccaacaatagcctgagcagcaacggcaacgtgaccgaaagcggatgtaaggaatgcgaggaactggaagagaagaatatcaaagaattcctgcaaagcttcgtgcacatcgtgcagatgttcatcaacacttcttcaggtggcggtagtggtgggggaggatctggaggcggaggaagcgggggtggaggttcaggaggagggagcttgcaaattacctgcccccctccgatgagcgtggagcacgccgacatctgggtcaagagctacagcttgtatagtagggagcggtacatctgtaacagcgggttcaagaggaaggccgggaccagctcactgaccgagtgcgtgttgaacaaggccaccaacgtggcccactggaccacccctagccttaagtgcatcagggacccagcgctcgtacaccagagacccgcgcctccctctacggtaaccacggcaggcgtaaccccccagcccgagagcctgtccccgagcggcaaggagcctgcagcgagcagcccctcaagcaacaacacagccgctaccaccgcggcaatcgtgcccggcagccagctgatgccctcaaagagccccagcaccggcaccactgagataagcagccacgagagctcacacggcactccctcacagaccactgccaagaattgggagctgaccgcctctgccagccaccagcccccaggcgtgtatccccagggccacagcgacaccacggtcgccatcagcacatctacagtgcttttgtgcggccttagcgccgtgtcactgctggcatgctacttgaaaagtaggcaaactccccctcttgccagtgtggaaatggaggccatggaagccctgcccgtgacctggggcaccagttctagggacgaggaccttgagaactgctcacatcatttgtga

SEQ ID NO: 646 - DNA, 1668 bp, Artificial Sequence
  Description of Artificial Sequence: Synthetic polynucleotide
atggactggacatggatactcttcctggtagcagccgccacacgagtgcacagcaactgggtgaacgtgatctccgacctgaaaaagatcgaggatttgatccagagcatgcacattgacgccaccctgtataccgagtccgacgtgcacccgagttgcaaggtgactgccatgaagtgcttcctgctggagctgcaagtgatcagcctggagagcggcgacgccagcatccacgacaccgtggaaaaccttatcattctggccaacaatagcctgagcagcaacggcaacgtgaccgaaagcggatgtaaggaatgcgaggaactggaagagaagaatatcaaagaattcctgcaaagcttcgtgcacatcgtgcagatgttcatcaacacttcttcaggtggcggtagtggtgggggaggatctggaggcggaggaagcgggggtggaggttcaggaggagggagcttgcaaattacctgcccccctccgatgagcgtggagcacgccgacatctgggtcaagagctacagcttgtatagtagggagcggtacatctgtaacagcgggttcaagaggaaggccgggaccagctcactgaccgagtgcgtgttgaacaaggccaccaacgtggcccactggaccacccctagccttaagtgcatcagggacccagcgctcgtacaccagagacccgcgcctccctctacggtaaccacggcaggcgtaaccccccagcccgagagcctgtccccgagcggcaaggagcctgcagcgagcagcccctcaagcaacaacacagccgctaccaccgcggcaatcgtgcccggcagccagctgatgccctcaaagagccccagcaccggcaccactgagataagcagccacgagagctcacacggcactccctcacagaccactgccaagaattgggagctgaccgcctctgccagccaccagcccccaggcgtgtatccccagggccacagcgacaccacggtcgccatcagcacatctacagtgcttttgtgcggccttagcgccgtgtcactgctggcatgctacttgaaaagtaggcaaactccccctcttgccagtgtggaaatggaggccatggaagccctgcccgtgacctggggcaccagttctagggacgaggaccttgagaactgctcacatcatttgagcggcatctctctgattgcggcgctggcagttgactacgttattggcatggaaaacgcgatgccatggaacctcccggctgacctggcgtggttcaaacgtaacaccctgaacaaacctgtgatcatgggtcgtcacacctgggaatctattggccgtcctctcccgggtcgtaaaaacatcattctgtcttctcagccaggcaccgacgaccgtgttacctgggttaaaagcgttgacgaagcgattgctgcgtgcggtgatgttcctgaaattatggtgatcggcggtggccgtgttatcgaacagttcctgccgaaagcgcagaaactgtacctgacccacatcgacgcggaagttgaaggtgacacccacttcccggactacgaaccggatgattgggagagcgtattctccgaattccatgatgcggatgcgcaaaactctcattcttactgttttgaaatcctggaacgtcgttga

SEQ ID NO: 647 - DNA, 1752 bp, Artificial Sequence
  Description of Artificial Sequence: Synthetic polynucleotide
atggactggacatggatactcttcctggtagcagccgccacacgagtgcacagcaactgggtgaacgtgatctccgacctgaaaaagatcgaggatttgatccagagcatgcacattgacgccaccctgtataccgagtccgacgtgcacccgagttgcaaggtgactgccatgaagtgcttcctgctggagctgcaagtgatcagcctggagagcggcgacgccagcatccacgacaccgtggaaaaccttatcattctggccaacaatagcctgagcagcaacggcaacgtgaccgaaagcggatgtaaggaatgcgaggaactggaagagaagaatatcaaagaattcctgcaaagcttcgtgcacatcgtgcagatgttcatcaacacttcttcaggtggcggtagtggtgggggaggatctggaggcggaggaagcgggggtggaggttcaggaggagggagcttgcaaattacctgcccccctccgatgagcgtggagcacgccgacatctgggtcaagagctacagcttgtatagtagggagcggtacatctgtaacagcgggttcaagaggaaggccgggaccagctcactgaccgagtgcgtgttgaacaaggccaccaacgtggcccactggaccacccctagccttaagtgcatcagggacccagcgctcgtacaccagagacccgcgcctccctctacggtaaccacggcaggcgtaaccccccagcccgagagcctgtccccgagcggcaaggagcctgcagcgagcagcccctcaagcaacaacacagccgctaccaccgcggcaatcgtgcccggcagccagctgatgccctcaaagagccccagcaccggcaccactgagataagcagccacgagagctcacacggcactccctcacagaccactgccaagaattgggagctgaccgcctctgccagccaccagcccccaggcgtgtatccccagggccacagcgacaccacggtcgccatcagcacatctacagtgcttttgtgcggccttagcgccgtgtcactgctggcatgctacttgaaaagtaggcaaactccccctcttgccagtgtggaaatggaggccatggaagccctgcccgtgacctggggcaccagttctagggacgaggaccttgagaactgctcacatcatttgagcggcgttggttcgctaaactgcatcgtcgctgtgtcccagaacatgggcatcggcaagaacggggacctgccctggccaccgctcaggaatgaattcagatatttccagagaatgaccacaacctcttcagtagaaggtaaacagaatctggtgattatgggtaagaagacctggttctccattcctgagaagaatcgacctttaaagggtagaattaatttagttctcagcagagaactcaaggaacctccacaaggagctcattttctttccagaagtctagatgatgccttaaaacttactgaacaaccagaattagcaaataaagtagacatggtctggatagttggtggcagttctgttattaaggaattcatgaatcacccaggccatcttaaactatttgtgacaaggatcatgcaagactttgaaagtgacacgttttttccagaaattgatttggagaaatataaacttctgccagaatacccaggtgttctctctgatgtccaggaggagaaaggcattaagtacaaatttgaagtatatgagaagaatgattga

SEQ ID NO: 648 - DNA, 1752 bp, Artificial Sequence
  Description of Artificial Sequence: Synthetic polynucleotide
atggactggacatggatactcttcctggtagcagccgccacacgagtgcacagcaactgggtgaacgtgatctccgacctgaaaaagatcgaggatttgatccagagcatgcacattgacgccaccctgtataccgagtccgacgtgcacccgagttgcaaggtgactgccatgaagtgcttcctgctggagctgcaagtgatcagcctggagagcggcgacgccagcatccacgacaccgtggaaaaccttatcattctggccaacaatagcctgagcagcaacggcaacgtgaccgaaagcggatgtaaggaatgcgaggaactggaagagaagaatatcaaagaattcctgcaaagcttcgtgcacatcgtgcagatgttcatcaacacttcttcaggtggcggtagtggtgggggaggatctggaggcggaggaagcgggggtggaggttcaggaggagggagcttgcaaattacctgcccccctccgatgagcgtggagcacgccgacatctgggtcaagagctacagcttgtatagtagggagcggtacatctgtaacagcgggttcaagaggaaggccgggaccagctcactgaccgagtgcgtgttgaacaaggccaccaacgtggcccactggaccacccctagccttaagtgcatcagggacccagcgctcgtacaccagagacccgcgcctccctctacggtaaccacggcaggcgtaaccccccagcccgagagcctgtccccgagcggcaaggagcctgcagcgagcagcccctcaagcaacaacacagccgctaccaccgcggcaatcgtgcccggcagccagctgatgccctcaaagagccccagcaccggcaccactgagataagcagccacgagagctcacacggcactccctcacagaccactgccaagaattgggagctgaccgcctctgccagccaccagcccccaggcgtgtatccccagggccacagcgacaccacggtcgccatcagcacatctacagtgcttttgtgcggccttagcgccgtgtcactgctggcatgctacttgaaaagtaggcaaactccccctcttgccagtgtggaaatggaggccatggaagccctgcccgtgacctggggcaccagttctagggacgaggaccttgagaactgctcacatcatttgagcggcgttggttcgctaaactgcatcgtcgctgtgtcccagaacatgggcatcggcaagaacggggacctgccctggccaccgctcaggaatgaattcagatatttcttcagaatgaccacaacctcttcagtagaaggtaaacagaatctggtgattatgggtaagaagacctggttctccattcctgagaagttccgacctttaaagggtagaattaatttagttctcagcagagaactcaaggaacctccacaaggagctcattttctttccagaagtctagatgatgccttaaaacttactgaacaaccagaattagcaaataaagtagacatggtctggatagttggtggcagttctgttattaaggaagccatgaatcacccaggccatcttaaactatttgtgacaaggatcatgcaagactttgaaagtgacacgttttttccagaaattgatttggagaaatataaacttctgccagaatacccaggtgttctctctgatgtccaggaggagaaaggcattaagtacaaatttgaagtatatgagaagaatgattga

SEQ ID NO: 649 - protein, 4 aa, Artificial Sequence
  Description of Artificial Sequence: Synthetic Linker
GGSG

SEQ ID NO: 650 - DNA, 12 bp, Artificial Sequence
  Description of Artificial Sequence: Synthetic Linker
ggaggatctgga

SEQ ID NO: 651 - protein, 6 aa, Artificial Sequence
  Description of Artificial Sequence: Synthetic Linker
GGSGGG

SEQ ID NO: 652 - DNA, 18 bp, Artificial Sequence
  Description of Artificial Sequence: Synthetic Linker
ggtggctctggtggtggt

SEQ ID NO: 653 - DNA, 18 bp, Artificial Sequence
  Description of Artificial Sequence: Synthetic Linker
ggaggtagtggtggaggc

SEQ ID NO: 654 - protein, 5 aa, Artificial Sequence
  Description of Artificial Sequence: Synthetic Linker
SGGGS

SEQ ID NO: 655 - DNA, 15 bp, Artificial Sequence
  Description of Artificial Sequence: Synthetic Linker
tcaggtggcggtagt

SEQ ID NO: 656 - protein, 9 aa, Artificial Sequence
  Description of Artificial Sequence: Synthetic Linker
GGSGGGSGG

SEQ ID NO: 657 - DNA, 27 bp, Artificial Sequence
  Description of Artificial Sequence: Synthetic Linker
ggaggtagtggtggaggcagtggtgga

SEQ ID NO: 658 - protein, 5 aa, Artificial Sequence
  Description of Artificial Sequence: Synthetic Linker
GGGGG

SEQ ID NO: 659 - protein, 5 aa, Artificial Sequence
  Description of Artificial Sequence: Synthetic Linker
GGGGS

SEQ ID NO: 660 - protein, 10 aa, Artificial Sequence
  Description of Artificial Sequence: Synthetic Linker
GGGGSGGGGS

SEQ ID NO: 661 - protein, 20 aa, Artificial Sequence
  Description of Artificial Sequence: Synthetic Linker
GGGGSGGGGSGGGGSGGGGS

SEQ ID NO: 662 - protein, 25 aa, Artificial Sequence
  Description of Artificial Sequence: Synthetic Linker
GGGGSGGGGSGGGGSGGGGSGGGGS

SEQ ID NO: 663 - protein, 30 aa, Artificial Sequence
  Description of Artificial Sequence: Synthetic Linker
GGGGSGGGGSGGGGSGGGGSGGGGSGGGGS

SEQ ID NO: 664 - protein, 5 aa, Artificial Sequence
  Description of Artificial Sequence: Synthetic Linker
SSSSG

SEQ ID NO: 665 - protein, 10 aa, Artificial Sequence
  Description of Artificial Sequence: Synthetic Linker
SSSSGSSSSG

SEQ ID NO: 666 - protein, 15 aa, Artificial Sequence
  Description of Artificial Sequence: Synthetic Linker
SSSSGSSSSGSSSSG

SEQ ID NO: 667 - protein, 20 aa, Artificial Sequence
  Description of Artificial Sequence: Synthetic Linker
SSSSGSSSSGSSSSGSSSSG

SEQ ID NO: 668 - protein, 25 aa, Artificial Sequence
  Description of Artificial Sequence: Synthetic Linker
SSSSGSSSSGSSSSGSSSSGSSSSG

SEQ ID NO: 669 - protein, 30 aa, Artificial Sequence
  Description of Artificial Sequence: Synthetic Linker
SSSSGSSSSGSSSSGSSSSGSSSSGSSSSG

SEQ ID NO: 670 - DNA, 15 bp, Artificial Sequence
  Description of Artificial Sequence: Synthetic Linker
agcggcggtggcagc

SEQ ID NO: 671 - protein, 12 aa, Artificial Sequence
  Description of Artificial Sequence: Synthetic Linker
GKSSGSGSESKS

SEQ ID NO: 672 - protein, 15 aa, Artificial Sequence
  Description of Artificial Sequence: Synthetic Linker
GGSTSGSGKSSEGKG

SEQ ID NO: 673 - protein, 19 aa, Artificial Sequence
  Description of Artificial Sequence: Synthetic Linker
GSTSGSGKSSSEGSGSTKG

SEQ ID NO: 674 - protein, 18 aa, Artificial Sequence
  Description of Artificial Sequence: Synthetic Linker
GSTSGSGKPGSGEGSTKG

SEQ ID NO: 675 - protein, 13 aa, Artificial Sequence
  Description of Artificial Sequence: Synthetic Linker
VDYPYDVPDYALD

SEQ ID NO: 676 - DNA, 39 bp, Artificial Sequence
  Description of Artificial Sequence: Synthetic Linker
gtcgactatccctacgatgttccggactacgcactggac

SEQ ID NO: 677 - protein, 14 aa, Artificial Sequence
  Description of Artificial Sequence: Synthetic Linker
EGKSSGSGSESKEF

SEQ ID NO: 678 - DNA, 561 bp, Artificial Sequence
  Description of Artificial Sequence: Synthetic Destabilizing Domain (DD)
atggttggttcgctaaactgcatcgtcgctgtgtcccagaacatgggcatcggcaagaacggggacctgccctggccaccgctcaggaatgaattcagatatttccagagaatgaccacaacctcttcagtagaaggtaaacagaatctggtgattacgggtaagaagacctggttctccattcctgagaagaatcgacctttaaagggtagaattaatttagttctcagcagagaactcaaggaacctccacaaggagctcattttctttccagaagtctagatgatgccttaaaacttactgaacaaccagaattagcaaataaagtagacatggtctggatagttggtggcagttctgtttataaggaagccatgaatcacccaggccatcttaaactatttgtgacaatcatcatgcaagactttgaaagtgacacgttttttccagaaattgatttggagaaatataaacttctgccagaatacccaggtgttctctctgatgtccaggaggagaaaggcattaagtacaaatttgaagtatatgagaagaatgat

SEQ ID NO: 679 - DNA, 561 bp, Artificial Sequence
  Description of Artificial Sequence: Synthetic Destabilizing Domain (DD)
atggttggttcgctaaactgcatcgtcgctgtgtcccagaacatgggcatcggcaagaacacggacctgccctggccaccgctcaggaatgaattcagatatttccagagaatgaccacaacctcttcagtagaaggtaaacagaatctggtgattatgggtaagaagacctggttctccattcctgagaagaatcgacctttaaagggtagaattaatttagttctcagcagagaactcaaggaacctccacaaggagctcattttctttccagaagtctagatgatgccttaaaacttactgaacaaccagaattagcaaataaagtagacatggtctggatagttggtggcagttctgttattaaggaagccatgaatcacccaggccatcttaaactatttgtgacaaggatcatgcaagactttgaaagtgacacgttttttccagaaattgatttggagaaatataaacttctgccagaatacccaggtgttctctctgatgtccaggaggagaaaggcattaagtacaaatttgaagtatatgagaagaatgat

SEQ ID NO: 680 - DNA, 561 bp, Artificial Sequence
  Description of Artificial Sequence: Synthetic Destabilizing Domain (DD)
atggttggttcgctaaactgcatcgtcgctgtgtcccagaacatgggcatcggcaagaacggggacctgccctggccaccgctcaggaatgaattcagatatttccagagaatgaccacaacctcttcagtagaaggtaaacagaatctggtgattatgggtaagaagacctggttctccattcctgagaagaatcgacctttaaagggtagaattaataacgttctcagcagagaactcaaggaacctccacaaggagctcattttctttccagaagtctagatgatgccttaaaacttactgaacaaccagaattagcaaataaagtagacatggtctggatagttggtggcagttctgttattaaggaagccatgaatcacccaggccatcttaaactatttgtgacaaggatcatgcaagactttgaaagtgacacgttttttccagaaattgatttggagaaatataaacttctgccagaatacccaggtgttctctctgatgtccaggaggagaaaggcattaagtacaaatttgaagtatatgagaagaatgat

SEQ ID NO: 681 - DNA, 561 bp, Artificial Sequence
  Description of Artificial Sequence: Synthetic Destabilizing Domain (DD)
atggttggttcgctaaactgcatcgtcgctgtgtcccagaacatgggcatcggcaagaacggggacctgccctggccaccgctcaggaatgaattcagatatttccagagaatgaccacaacctcttcagtagaaggtaaacagaatctggtgattatgggtaagaagacctggttctccattcctgagaagaatcgacctttaaagggtagaattaatttatttctcagcagagaactcaaggaacctccacaaggagctcattttctttccagaagtctagatgatgccttaaaacttactgaacaaccagaattagcaaataaagtagacatggtctggatagttggtggcagttctgttattaaggaagccatgaatcacccaggccatcttaaactatttgtgacaaggatcatgcaagactttgaaagtgacacgttttttccagaaattgatttggagaaatataaacttctgccagaatacccaggtgttctctctgatgtccaggaggagaaaggcattaagtacaaatttgaagtatatgagaagaatgat

SEQ ID NO: 682 - DNA, 561 bp, Artificial Sequence
  Description of Artificial Sequence: Synthetic Destabilizing Domain (DD)
atggttggttcgctaaactgcatcgtcgctgtgtcccagaacatgggcatcggcaagaacggggacctgccctggccaccgctcaggaatgaattcagatatttccagagaatgaccacaacctcttcagtagaaggtaaacagaatctggtgattatgggtaagaagacctggttctccattcctgagaagaatcgacctttaaagggtagaattaatttagttctcagcagagaactcaaggaacctccacaaggagctcattttctttccagaagtgcagatgatgccttaaaacttactgaacaaccagaattagcaaataaagtagacatggtctggatagttggtggcagttctgtttataaggaagccatgaatcacccaggccatcttaaactatttgtgacaaggatcatgcaagactttgaaagtgacgcgttttttccagaaattgatttggagaaatataaacttctgccagaatacccaggtgttctctctgatgtccaggaggagaaaggcattaagtacaaatttgaagtatatgagaagaatgat

SEQ ID NO: 683 - DNA, 561 bp, Artificial Sequence
  Description of Artificial Sequence: Synthetic Destabilizing Domain (DD)
atggttggttcgctaaactgcatcgtcgctgtgtcccagaacatgggcatcggcaagaacggggacctgccctggccaccgctcaggaatgaattcagatatttccagagaatgaccacaacctcttcagtagaaggtaaacagaatctggtgattatgggtaagaagacctggttctccattcctgagaagaatcgacctttaaagggtagaattaatttagttctcagcagagaactcaaggaacctccacaaggagctcattttctttccagaagtctagatgatgccttaaaacttactgaacaaccagaattagcaaataaagtagacatggtctggatagttggtggcagttctgctattaaggaagccatgaatcacccaggccatcttaaactatttgtgacaaggatcatgcaagactttgaaagtgacacgttttttccagaaattgatttggagaaatataaacttctgccagaatacccaggtgttctctctgatgtccaggaggagaaaggcattaagtacaaatttgaagtatatgagaagaatgat

SEQ ID NO: 684 - protein, 311 aa, Renilla reniformis
MTSKVYDPEQRKRMITGPQWWARCKQMNVLDSFINYYDSEKHAENAVIFLHGNAASSYLWRHVVPHIEPVARCIIPDLIGMGKSGKSGNGSYRLLDHYKYLTAWFELLNLPKKIIFVGHDWGACLAFHYSYEHQDKIKAIVHAESVVDVIESWDEWPDIEEDIALIKSEEGEKMVLENNFFVETMLPSKIMRKLEPEEFAAYLEPFKEKGEVRRPTLSWPREIPLVKGGKPDVVQIVRNYNAYLRASDDLPKMFIESDPGFFSNAIVEGAKKFPNTEFVKVKGLHFSQEDAPDEMGKYIKSFVERVLKNEQ

SEQ ID NO: 685 - DNA, 936 bp, Renilla reniformis
atgacttccaaggtgtacgaccccgagcaacgcaaacgcatgatcactgggcctcagtggtgggctcgctgcaagcaaatgaacgtgctggactccttcatcaactactatgattccgagaagcacgccgagaacgccgtgatttttctgcatggtaacgctgcctccagctacctgtggaggcacgtcgtgcctcacatcgagcccgtggctagatgcatcatccctgatctgatcggaatgggtaagtccggcaagagcgggaatggctcatatcgcctcctggatcactacaagtacctcaccgcttggttcgagctgctgaaccttccaaagaaaatcatctttgtgggccacgactggggggcttgtctggcctttcactactcctacgagcaccaagacaagatcaaggccatcgtccatgctgagagtgtcgtggacgtgatcgagtcctgggacgagtggcctgacatcgaggaggatatcgccctgatcaagagcgaagagggcgagaaaatggtgcttgagaataacttcttcgtcgagaccatgctcccaagcaagatcatgcggaaactggagcctgaggagttcgctgcctacctggagccattcaaggagaagggcgaggttagacggcctaccctctcctggcctcgcgagatccctctcgttaagggaggcaagcccgacgtcgtccagattgtccgcaactacaacgcctaccttcgggccagcgacgatctgcctaagatgttcatcgagtccgaccctgggttcttttccaacgctattgtcgagggagctaagaagttccctaacaccgagttcgtgaaggtgaagggcctccacttcagccaggaggacgctccagatgaaatgggtaagtacatcaagagcttcgtggagcgcgtgctgaagaacgagcagtaa

SEQ ID NO: 686 - protein, 550 aa, Photinus pyralis
MEDAKNIKKGPAPFYPLEDGTAGEQLHKAMKRYALVPGTIAFTDAHIEVDITYAEYFEMSVRLAEAMKRYGLNTNHRIVVCSENSLQFFMPVLGALFIGVAVAPANDIYNERELLNSMGISQPTVVFVSKKGLQKILNVQKKLPIIQKIIIMDSKTDYQGFQSMYTFVTSHLPPGFNEYDFVPESFDRDKTIALIMNSSGSTGLPKGVALPHRTACVRFSHARDPIFGNQIIPDTAILSVVPFHHGFGMFTTLGYLICGFRVVLMYRFEEELFLRSLQDYKIQSALLVPTLFSFFAKSTLIDKYDLSNLHEIASGGAPLSKEVGEAVAKRFHLPGIRQGYGLTETTSAILITPEGDDKPGAVGKVVPFFEAKVVDLDTGKTLGVNQRGELCVRGPMIMSGYVNNPEATNALIDKDGWLHSGDIAYWDEDEHFFIVDRLKSLIKYKGYQVAPAELESILLQHPNIFDAGVAGLPDDDAGELPAAVVVLEHGKTMTEKEIVDYVASQVTTAKKLRGGVVFVDEVPKGLTGKLDARKIREILIKAKKGGKSKL

SEQ ID NO: 687 - DNA, 1653 bp, Photinus pyralis
atggaagatgccaaaaacattaagaagggcccagcgccattctacccactcgaagacgggaccgccggcgagcagctgcacaaagccatgaagcgctacgccctggtgcccggcaccatcgcctttaccgacgcacatatcgaggtggacattacctacgccgagtacttcgagatgagcgttcggctggcagaagctatgaagcgctatgggctgaatacaaaccatcggatcgtggtgtgcagcgagaatagcttgcagttcttcatgcccgtgttgggtgccctgttcatcggtgtggctgtggccccagctaacgacatctacaacgagcgcgagctgctgaacagcatgggcatcagccagcccaccgtcgtattcgtgagcaagaaagggctgcaaaagatcctcaacgtgcaaaagaagctaccgatcatacaaaagatcatcatcatggatagcaagaccgactaccagggcttccaaagcatgtacaccttcgtgacttcccatttgccacccggcttcaacgagtacgacttcgtgcccgagagcttcgaccgggacaaaaccatcgccctgatcatgaacagtagtggcagtaccggattgcccaagggcgtagccctaccgcaccgcaccgcttgtgtccgattcagtcatgcccgcgaccccatcttcggcaaccagatcatccccgacaccgctatcctcagcgtggtgccatttcaccacggcttcggcatgttcaccacgctgggctacttgatctgcggctttcgggtcgtgctcatgtaccgcttcgaggaggagctattcttgcgcagcttgcaagactataagattcaatctgccctgctggtgcccacactatttagcttcttcgctaagagcactctcatcgacaagtacgacctaagcaacttgcacgagatcgccagcggcggggcgccgctcagcaaggaggtaggtgaggccgtggccaaacgcttccacctaccaggcatccgccagggctacggcctgacagaaacaaccagcgccattctgatcacccccgaaggggacgacaagcctggcgcagtaggcaaggtggtgcccttcttcgaggctaaggtggtggacttggacaccggtaagacactgggtgtgaaccagcgcggcgagctgtgcgtccgtggccccatgatcatgagcggctacgttaacaaccccgaggctacaaacgctctcatcgacaaggacggctggctgcacagcggcgacatcgcctactgggacgaggacgagcacttcttcatcgtggaccggctgaagagcctgatcaaatacaagggctaccaggtagccccagccgaactggagagcatcctgctgcaacaccccaacatcttcgacgccggggtcgccggcctgcccgacgacgatgccggcgagctgcccgccgcagtcgtcgtgctggaacacggtaaaaccatgaccgagaaggagatcgtggactatgtggccagccaggttacaaccgccaagaagctgcgcggtggtgttgtgttcgtggacgaggtgcctaaaggactgaccggcaagttggacgcccgcaagatccgcgagattctcattaaggccaagaagggcggcaagagcaagctgtga

SEQ ID NO: 688 - protein, 186 aa, Artificial Sequence
  Description of Artificial Sequence: Synthetic Destabilizing Domain (DD)
VGSLNCIVAVSQNMGVGKNGDLPWPPLRNEFRYFQRMTTTSSVEGKQNLVIMGKKTWFSIPEKNRPLKGRINLVLSRELKEPPQGAHFLSRSLDDALKLTEQPELANKVDMVWIVGGSSVIKEAMNHPGHLKLFVTRIMQDFESDTFFPEIDLEKYKLLPEYPGVLSDVQEEKGIKYKFEVYEKND

SEQ ID NO: 689 - protein, 186 aa, Artificial Sequence
  Description of Artificial Sequence: Synthetic Destabilizing Domain (DD)
VGSLNCIVAVSQNMGIGKNGDLPWPPLRNEFRYFQRMTTTSSVEGKQNLVIMGKKTWFSIPEKNRPLKGRINLVLSRELKEPPQGAHFLSRSLDDALKLTEQPELANKVDMVWIVGGSSVYKEAMNHPGHLKLFVTRIMQDFESDTFFPEIDLEKYKLLPGYPGVLSDVQEEKGFKYKFEVYEKND

SEQ ID NO: 690 - protein, 186 aa, Artificial Sequence
  Description of Artificial Sequence: Synthetic Destabilizing Domain (DD)
VGSLNCIVAVSQNMGIGKNGDLPWPPLRNEFRYFQRMTTTSSVEGKQNLVIMGKKTWFSIPEKNRPLKGRINLVLSRELKEPPQGAHFLSRSLDDALKLTEQPELANKVDMVWIVGGSSVYKEAMNHPGHLKLFVTRIMQDFESDTFFPEIDLEKYKLLPEYPGVLSDVQEEKGIKYKFEVYEEND

SEQ ID NO: 691 - protein, 186 aa, Artificial Sequence
  Description of Artificial Sequence: Synthetic Destabilizing Domain (DD)
VGSLNCIVAVSQNMGIGKNGDLPWPPLRNEFRYFQRMTTTSSVEGKQNLVIMGKKTWFSIPEKNRPLKGRINLVLSRELKEPPQGAHFLSRSLDDALKLTEQPELANKVDMVWIVGGSSVIKEFMNHPGHLKLFVTRIMQDFESDTFFPEIDLEKYKLLPEYPGVLSDVQEEKGIKYKFEVYEKND

SEQ ID NO: 692 - protein, 186 aa, Artificial Sequence
  Description of Artificial Sequence: Synthetic Destabilizing Domain (DD)
VGSLNCIVAVSQNMGIGKNGDLPWPPLRNEFRYFFRMTTTSSVEGKQNLVIMGKKTWFSIPEKFRPLKGRINLVLSRELKEPPQGAHFLSRSLDDALKLTEQPELANKVDMVWIVGGSSVIKEAMNHPGHLKLFVTRIMQDFESDTFFPEIDLEKYKLLPEYPGVLSDVQEEKGIKYKFEVYEKND

SEQ ID NO: 693 - protein, 186 aa, Artificial Sequence
  Description of Artificial Sequence: Synthetic Destabilizing Domain (DD)
VGSLNCIVAVSQNMGIGKNGDLPWPPLRNEFRYFQRMTTTSSVEGKQNLVIMGKKTWFSIPEKNRPLKGRINLVLSRELKEPPQGAHFLSRSLDDALKLTEQPELANKVDMVWIVGGSSVYKEAMYHPGHLKLFVTRIMQDFESDTFFPEIDLEKYKLLPEYPGVLSDVQEEKGIKYKFEVYEKND

SEQ ID NO: 694 - protein, 186 aa, Artificial Sequence
  Description of Artificial Sequence: Synthetic Destabilizing Domain (DD)
VGSLNCIVAVSQNMGIGKNGDLPWPPLRNEFRYFQRMTTTSSVEGKQNLVIMGKKTWFSIPEKNRPLKGRINLVLSRELKEPPQGAHFLSRSLDDALKLTEQPELANKVDMVWIVGGSSVYKEAMNHPGRLKLFVTRIMQDFGSDTFFPEIDLEKYKLLPEYPGVLSDVQEEKGIKYKFEVYEKND

SEQ ID NO: 695 - protein, 186 aa, Artificial Sequence
  Description of Artificial Sequence: Synthetic Destabilizing Domain (DD)
VGSLNCIVAVSQNMGVGKNGDLPWPPLRNEFRYFQRMTTTSSVEGKQNLVIMGKKTWFSIPEKNRPLKGRINLVLSRELKEPPQGAHFLSRSLDDALKLTEQPELANKVDMVWIVGGSSVYKEAMNHPGHLKLFVTRIMQDFESDTFFPEIDLEKYKLLPEYPGVLSDVQEEKGIKYKFEVYEKND

SEQ ID NO: 696 - protein, 186 aa, Artificial Sequence
  Description of Artificial Sequence: Synthetic Destabilizing Domain (DD)
VGSLNCIVAVSQNMGIGKNGDLPWPPLRNEFRYFQRMTTTSSVEGKQNLVIMGKKTWFSIPEKNRPLKGRINLVLSRELKEPPQGAHFLSRSLDDALKLTEQPELANKVDMVWIVGGSSVIKEAMNHPGHLKLFVTRIMQDFESDTFFPEIDLEKYKLLPEYPGVLSDVQEEKGIKYKFEVYEKND

SEQ ID NO: 697 - protein, 106 aa, Homo sapiens
IEVMYPPPYLDNEKSNGTIIHVKGKHLCPSPLFPGPSKPFWVLWVGGVLACYSLLVTVAFIIFWVRSKRSRLLHSDYMNMTPRRPGPTRKHYQPYAPPRDFAAYRS

SEQ ID NO: 698 - protein, 28 aa, Homo sapiens
FWVLVVVGGVLACYSLLVTVAFIIFWVR

SEQ ID NO: 699 - protein, 73 aa, Homo sapiens
TPAPRPPTPAPTIASQPLSLRPEACRPAAGGAWTRGLDFACDIYIWAPLAGTCGVLLLSLVITLYCNHRNRRR

SEQ ID NO: 700 - protein, 23 aa, Homo sapiens
LGLLVAGVLVLLVSLGVAIHLCC

SEQ ID NO: 701 - protein, 27 aa, Homo sapiens
ILLAGLVAADAVASLLIVGAVFLCARR

SEQ ID NO: 702 - protein, 21 aa, Homo sapiens
FWLPIGCAAFVVVCILGCILI

SEQ ID NO: 703 - protein, 233 aa, Homo sapiens
EPKSPDKTHTCPPCPAPPVAGPSVFLFPPKPKDTLMIARTPEVTCVVVDVSHEDPEVKFNWYVDGVEVHNAKTKPREEQYNSTYRVVSVLTVLHQDWLNGKEYKCKVSNKALPAPIEKTISKAKGQPREPQVYTLPPSRDELTKNQVSLTCLVKGFYPSDIAVEWESNGQPENNYKTTPPVLDSDGSFFLYSKLTVDKSRWQQGNVFSCSVMHEALHNHYTQKSLSLSPGKKD

SEQ ID NO: 704 - protein, 21 aa, Homo sapiens
LLFLILGVLSLLLLVTGAFGF

SEQ ID NO: 705 - protein, 21 aa, Homo sapiens
VAAILGLGLVLGLLGPLAILL

SEQ ID NO: 706 - protein, 20 aa, Homo sapiens
VGWGGLLGSLVLLVWVLAVI

SEQ ID NO: 707 - protein, 27 aa, Homo sapiens
FWALVVVAGVLFCYGLLVTVALCVIWT

SEQ ID NO: 708 - DNA, 1335 bp, Artificial Sequence
  Description of Artificial Sequence: Synthetic Promoter
gagtaattcatacaaaaggactcgcccctgccttggggaatcccagggaccgtcgttaaactcccactaacgtagaacccagagatcgctgcgttcccgccccctcacccgcccgctctcgtcatcactgaggtggagaagagcatgcgtgaggctccggtgcccgtcagtgggcagagcgcacatcgcccacagtccccgagaagttggggggaggggtcggcaattgaaccggtgcctagagaaggtggcgcggggtaaactgggaaagtgatgtcgtgtactggctccgcctttttcccgagggtgggggagaaccgtatataagtgcagtagtcgccgtgaacgttctttttcgcaacgggtttgccgccagaacacaggtaagtgccgtgtgtggttcccgcgggcctggcctctttacgggttatggcccttgcgtgccttgaattacttccacgcccctggctgcagtacgtgattcttgatcccgagcttcgggttggaagtgggtgggagagttcgaggccttgcgcttaaggagccccttcgcctcgtgcttgagttgaggcctggcttgggcgctggggccgccgcgtgcgaatctggtggcaccttcgcgcctgtctcgctgctttcgataagtctctagccatttaaaatttttgatgacctgctgcgacgctttttttctggcaagatagtcttgtaaatgcgggccaagatctgcacactggtatttcggtttttggggccgcgggcggcgacggggcccgtgcgtcccagcgcacatgttcggcgaggcggggcctgcgagcgcggccaccgagaatcggacgggggtagtctcaagctggccggcctgctctggtgcctggcctcgcgccgccgtgtatcgccccgccctgggcggcaaggctggcccggtcggcaccagttgcgtgagcggaaagatggccgcttcccggccctgctgcagggagctcaaaatggaggacgcggcgctcgggagagcgggcgggtgagtcacccacacaaaggaaaagggcctttccgtcctcagccgtcgcttcatgtgactccacggagtaccgggcgccgtccaggcacctcgattagttctcgagcttttggagtacgtcgtctttaggttggggggaggggttttatgcgatggagtttccccacactgagtgggtggagactgaagttaggccagcttggcacttgatgtaattctccttggaatttgccctttttgagtttggatcttggttcattctcaagcctcagacagtggttcaaagtttttttcttccatttcaggtgtcgtga

SEQ ID NO: 709 - DNA, 15 bp, Artificial Sequence
  Description of Artificial Sequence: Synthetic Linker
tcaggcggggggagt

SEQ ID NO: 710 - DNA, 45 bp, Artificial Sequence
  Description of Artificial Sequence: Synthetic Linker
ggaggaggaggatccggaggaggaggatctggcggcggcggcagc

SEQ ID NO: 711 - DNA, 45 bp, Artificial Sequence
  Description of Artificial Sequence: Synthetic Linker
ggaggaggaggatccggaggaggaggatctggcggaggaggcagc

SEQ ID NO: 712 - DNA, 45 bp, Artificial Sequence
  Description of Artificial Sequence: Synthetic Linker
ggaggaggaggaagcggaggaggaggatccggcggaggaggctct

SEQ ID NO: 713 - DNA, 45 bp, Artificial Sequence
  Description of Artificial Sequence: Synthetic Linker
ggaggaggaggcagcggaggaggaggttctggaggaggcggcagc

SEQ ID NO: 714 - DNA, 45 bp, Artificial Sequence
  Description of Artificial Sequence: Synthetic Linker
ggcggcggcggctctggaggaggaggcagcggcggaggaggctcc

SEQ ID NO: 715 - DNA, 45 bp, Artificial Sequence
  Description of Artificial Sequence: Synthetic Linker
ggaggaggaggcagcggcggaggaggctccggcggcggcggctct

SEQ ID NO: 716 - DNA, 78 bp, Artificial Sequence
  Description of Artificial Sequence: Synthetic Linker
tcaggtggcggtagtggtgggggaggatctggaggcggaggaagcgggggtggaggttcaggtggaggcagcttgcaa

SEQ ID NO: 717 - DNA, 78 bp, Artificial Sequence
  Description of Artificial Sequence: Synthetic Linker
tccggtggaggtagcggtggagggggttctggtggaggaggttctggaggtggaggttctggcggtgggtccttgcaa

SEQ ID NO: 718 - DNA, 78 bp, Artificial Sequence
  Description of Artificial Sequence: Synthetic Linker
tctggcggaggaagcggaggcggaggatctggtggtggtggatctggcggcggtggtagtggcggaggttctctgcaa

SEQ ID NO: 719 - DNA, 78 bp, Artificial Sequence
  Description of Artificial Sequence: Synthetic Linker
tccggggggggtagcgggggagggggttccggcgggggagggtctggagggggaggttccggcggggggtccttgcaa

SEQ ID NO: 720 - DNA, 78 bp, Artificial Sequence
  Description of Artificial Sequence: Synthetic Linker
tctggcggaggatctggaggaggcggatctggaggaggaggcagtggaggcggaggatctggcggaggatctctgcag

SEQ ID NO: 721 - protein, 34 aa, Artificial Sequence
  Description of Artificial Sequence: Synthetic Linker
SGGGSGGGGSGGGGSGGGGSGGGGSGGGGSGGGS

SEQ ID NO: 722 - protein, 20 aa, Artificial Sequence
  Description of Artificial Sequence: Synthetic Linker
SGGGSGGGGSGGGGSGGGGS

SEQ ID NO: 723 - DNA, 102 bp, Artificial Sequence
  Description of Artificial Sequence: Synthetic Linker
tctggtggcgggagtggaggaggtgggtccggagggggagggagcggtggtggaggttccggcggggggggtagtggaggcggagggtcaggtgggggcagc

SEQ ID NO: 724 - DNA, 60 bp, Artificial Sequence
  Description of Artificial Sequence: Synthetic Linker
agtggtggcgggtccggcggtggtggtagcgggggtggaggctcaggtggcggtggcagt

SEQ ID NO: 725 - protein, 20 aa, Artificial Sequence
  Description of Artificial Sequence: Synthetic Cleavable Peptide
GATNFSLLKQAGDVEENPGP

SEQ ID NO: 726 - DNA, 60 bp, Artificial Sequence
  Description of Artificial Sequence: Synthetic Cleavable Peptide
ggagctactaacttcagcctgctgaagcaggctggagacgtggaggagaaccctggacct

SEQ ID NO: 727 - DNA, 28 bp, Artificial Sequence
  Description of Artificial Sequence: Synthetic Spacer
tctagataatacgactcactagagatcc

SEQ ID NO: 728 - DNA, 16 bp, Artificial Sequence
  Description of Artificial Sequence: Synthetic Spacer
tatggccacaaccatg

SEQ ID NO: 729 - DNA, 30 bp, Artificial Sequence
  Description of Artificial Sequence: Synthetic Spacer
aatctagataatacgactcactagagatcc

SEQ ID NO: 730 - DNA, 54 bp, Homo sapiens
atggactggacctggattctgtttctggtggccgctgccacaagagtgcacagc

SEQ ID NO: 731 - DNA, 54 bp, Homo sapiens
atggattggacctggattctgtttctggtggccgctgccacaagagtgcacagc

SEQ ID NO: 732 - protein, 30 aa, Homo sapiens
MAPRRARGCRTLGLPALLLLLLLRPPATRG

SEQ ID NO: 733 - DNA, 90 bp, Artificial Sequence
  Description of Artificial Sequence: Synthetic Construct
atggccccgcggcgggcgcgcggctgccggaccctcggtctcccggcgctgctactgctgctgctgctccggccgccggcgacgcggggc

SEQ ID NO: 734 - DNA, 561 bp, Artificial Sequence
  Description of Artificial Sequence: Synthetic Destabilizing Domain (DD)
atggttggttcgctaaactgcatcgtcgctgtgtcccagaacatgggcgtcggcaagaacggggacctgccctggccaccgctcaggaatgaattcagatatttccagagaatgaccacaacctcttcagtagaaggtaaacagaatctggtgattatgggtaagaagacctggttctccattcctgagaagaatcgacctttaaagggtagaattaatttagttctcagcagagaactcaaggaacctccacaaggagctcattttctttccagaagtctagatgatgccttaaaacttactgaacaaccagaattagcaaataaagtagacatggtctggatagttggtggcagttctgtttataaggaagccatgaatcacccaggccatcttaaactatttgtgacaaggatcatgcaagactttgaaagtgacacgttttttccagaaattgatttggagaaatataaacttctgccagaatacccaggtgttctctctgatgtccaggaggagaaaggcattaagtacaaatttgaagtatatgagaagaatgat

SEQ ID NO: 735 - DNA, 561 bp, Artificial Sequence
  Description of Artificial Sequence: Synthetic Destabilizing Domain (DD)
atggttggttcgctaaactgcatcgtcgctgtgtcccagaacatgggcatcggcaagaacggggacctgccctggccaccgctcaggaatgaattcagatatttccagagaatgaccacaacctcttcagtagaaggtaaacagaatctggtgattatgggtaagaagacctggtcctccattcctgagaagaaccgacctttaaagggtagaattaatttagttctcagcagagaactcaaggaacctccacaaggagctcattttctttccagaagtctagatgatgccttaaaacttactgaacaaccagaattagcaaataaagtagacatggtctggatagttggtggcagttctgtttataaggaagccatgaatcacccaggccatcttaaactatttgtgacaaggatcatgcaagactttgaaagtgacacgttttttccagaaattgatttggagaaatataaacttctgccagaatacccaggtgttctctctgatgtccaggaggagaaaggcattaagtacaaatttgaagtatatgagaagaatgat

SEQ ID NO: 736 - DNA, 561 bp, Artificial Sequence
  Description of Artificial Sequence: Synthetic Destabilizing Domain (DD)
atggttggttcgctaaactgcatcgtcgctgtgtcccagaacatgggcatcggcaagaacggggacctgccctggccaccgctcaggaatgaattcagatatttccagagaatgaccacaacctcttcagtagaaggtaaacagaatctggtgattatgggtaagaagacctggttctccattcctgagaaggatcgacctttaaagggtagaattaatttagttctcagcagagaactcaaggaacctccacaaggagctcattttctttccagaagtctagatgatgccttaaaacttactgaacaaccagaattagcaaataaagtagacatggtctggatagttggtggcagttctgtttataaggaagccatgaatcacccaggccatcttaaactatttgtgacaaggatcatgcaagactttgaaagtgacacgttttttccagaaattgatttggagaaatataaacttctgccagaatacccaggtgttctctctgatgtccaggaggagaaaggcattaagtacaaatttgaagtatatgagaagaatgat

SEQ ID NO: 737 - DNA, 561 bp, Artificial Sequence
  Description of Artificial Sequence: Synthetic Destabilizing Domain (DD)
atggttggttcgctaaactgcatcgtcgctgtgtcccagaacatgggcatcggcaagaacggggacctgccctggccaccgctcaggaatgaattcagatatttccagagaatgaccacaacctcttcagtagaaggtaaacagaatctggtgattatgggtaagaagacctggttctccattcctgagaagaatcgacctttaaagggtagaattaatttagttctcagcagagaactcagggaacctccacaaggagctcattttctttccagaagtctagatgatgccttaaaacttactgaacaaccagaattagcaaataaagtagacatggtctggatagttggtggcagttctgtttataaggaagccatgaatcacccaggccatcttaaactatttgtgacaaggatcatgcaagactttgaaagtgacacgttttttccagaaattgatttggagaaatataaacttctgccagaatacccaggtgttctctctgatgtccaggaggagaaaggcattaagtacaaatttgaagtatatgagaagaatgat

SEQ ID NO: 738 - DNA, 561 bp, Artificial Sequence
  Description of Artificial Sequence: Synthetic Destabilizing Domain (DD)
atggttggttcgctaaactgcatcgtcgctgtgtcccagaacatgggcatcggcaagaacggggacctgccctggccaccgctcaggaatgaattcagatatttccagagaatgaccacaacctcttcagtagaaggtaaacagaatctggtgattatgggtaagaagacctggttctccattcctgagaagaatcgacctttaaagggtagaattaatttagttctcagcagagaactcaaggaacctccacaaggagctcattttctttccaggagtctagatgatgccttaaaacttactgaacaaccagaattagtaaataaagtagacatggtctggatagttggtggcagttctgtttataaggaagccatgaatcacccaggccatcttaaactatttgtgacaaggatcatgcaagactttgaaagtgacacgttttttccagaaattgatttggagaaatataaacttctgccagaatacccaggtgttctctctgatgtccaggaggagaaaggcattaagtacaaatttgaagtatatgagaagaatgat

SEQ ID NO: 739 - DNA, 561 bp, Artificial Sequence
  Description of Artificial Sequence: Synthetic Destabilizing Domain (DD)
atggttggttcgctaaactgcatcgtcgctgtgtcccagaacatgggcatcggcaagaacggggacctgccctggccaccgctcaggaatgaattcagatatttccagagaatgaccacaacctcttcagtagaaggtaaacagaatctggtgattatgggtaagaagacctggttctccattcctgagaagaatcgacctttaaagggtagaattaatttagttctcagcagagaactcaaggaacctccacaaggagctcattttctttccagaagtctagatgatgccttaaaacttactgaacaaccagaattagcaaataaagtagacatggtctggatagttggtggcagttctgtttataaggaagccatgtatcacccaggccatcttaaactatttgtgacaaggatcatgcaagactttgaaagtgacacgttttttccagaaattgatttagagaaatataaacttctgccagaatacccaggtgttctctctgatgtccaggaggagaaaggcattaagtacaaatttgaagtatatgagaagaatgat

SEQ ID NO: 740 - DNA, 561 bp, Artificial Sequence
  Description of Artificial Sequence: Synthetic Destabilizing Domain (DD)
atggttggttcgctaaactgcatcgtcgctgtgtcccagaacatgggcatcggcaagaacggggacctgccctggccaccgctcaggaatgaattcagatatttccagagaatgaccacaacctcttcagtagaaggtaaacagaatctggtgattatgggtaagaagacctggttctccattcctgagaagaatcgacctttaaagggtagaattaatttagttctcagcagagaactcaaggaacctccacaaggagctcattttctttccagaagtctagatgatgccttaaaacttactgaacaaccagaattagcaaataaagtagacatggtctggatagttggtggcagttctgtttataaggaagccatgaatcacccaggccatcttaaactatttgtgacaaggatcatacaagactttgaaagtgacacgttttttccagaaattgatttggagaaatataaacttctgccagaatacccaggtgttctctctgatgtccaggaggagaaaggcattaagtacaaatttgaagtatatgagaagaatgat

SEQ ID NO: 741 - DNA, 561 bp, Artificial Sequence
  Description of Artificial Sequence: Synthetic Destabilizing Domain (DD)
atggttggttcgctaaactgcatcgtcgctgtgtcccagaacatgggcatcggcaagaacggggacctgccctggccaccgctcaggaatgaattcagatatttccagagaatgaccacaacctcttcagtagaaggtaaacagaatctggtgattatgggtaagaagacctggttctccattcctgagaagaatcgacctttaaagggtagaattaatttagttctcagcagagaactcaaggaacctccacaaggagctcattttctttccagaagtctagatgatgccttaaaacttactgaacaaccagaattagcaaataaagtagacatggtctggatagttggtggcagttctgtttataaggaagccatgaatcacccaggccatcttaaactatttgtgacaaggatcatgcaagactttgaaagtgacacgttttttccagaaattgatttggagaaatataaacttctgccagaatacccaggtgttctctctgatgtccaggaggagaaaggcattaagtacaaatttgaagtatatgaggagaatgat

SEQ ID NO: 742 - DNA, 561 bp, Artificial Sequence
  Description of Artificial Sequence: Synthetic Destabilizing Domain (DD)
atggttggttcgctaaactgcatcgtcgctgtgtcccagaacatgggcatcggcaagaacggggacctgccctggccaccgctcaggaatgaattcagatatttccagagaatgaccacaacctcttcagtagaaggtaaacagaatctggtaattatgggtaagaagacctggttctccattcctgagaagaatcgacctttaaagggtagaattaatttagttctcagcagagaactcaaggaacctccacaaggagctcattttctttccagaagtctagatgatgccttaaaacttactgaacaaccagaattagcaaataaagtagacatggtctggatagttggtggcagttctgtttataaggaagccatgaatcacccaggccatcttaaactatttgtgacaaggatcatgcaagactttgaaagtgacacgttttttccagaaattgatttggagaaatataaacttctgccagaatacccaggtgttctctctgatgtccaggaggagaaaggcattaagtacaaatttgaggtatatgagaaggatgat

SEQ ID NO: 743 - DNA, 561 bp, Artificial Sequence
  Description of Artificial Sequence: Synthetic Destabilizing Domain (DD)
atggttggttcgctaaaccgcatcgtcgctgtgtcccagaacatgggcatcggcaagaacggggacctgccctggccaccgctcaggaatgaattcagatatttccagagaatgaccacaacctcttcagtagaaggtaaacagaatctggtgattatgggtaagaagacctggttctccattcctgagaagaatcgacctttaaagggtagaattaatttagttctcagcagagaactcaaggaacctccacaaggagctcattttctttccagaagtctagatgatgccttaaaacttactgaacaaccagaattagcaaataaagtagacatggtctggatagttggtggcagttctgtttataaggaagccatgaatcacccaggccatcttaaactatttgtgacaaggatcatgcaagactttgaaagtgacacgttttttccagaaattgatttggagaaatataaacttctgccagaatgcccaggtgttctctctgatgtccaggaggagaaaggcattaagtacaaatttgaagtatatgagaagaatgat

SEQ ID NO: 744 - DNA, 561 bp, Artificial Sequence
  Description of Artificial Sequence: Synthetic Destabilizing Domain (DD)
atggttggttcgctaaactgcatcgttgttgtgtcccagaacatgggcatcggcaagaacggggacctgccctggccaccgctcaggaatgaattcagatatttccagagaatgaccacaacctcttcagtagaaggtaaacagaatctggtgattatgggtaagaagacctggttctccattcctgagaagaatcgacctttaaagggtagaattaatttagttctcagcagagaactcaaggaacctccacaaggagcttattttctttccagaagtctagatgatgccttaaaacttactgaacaaccagaattagcaaataaagtagacatggtctggatagttggtggcagttctgtttataaggaagccatgaatcacccaggccatcttaaactatttgtgacaaggatcatgcaagactttgaaagtgacacgttttttccagaaattgatttggagaaatataaacttctgccagaatacccaggtgttctctctgatgtccaggaggagaaaggcattaagtacaaatttgaagtatatgagaagaatgat

SEQ ID NO: 745 - DNA, 561 bp, Artificial Sequence
  Description of Artificial Sequence: Synthetic Destabilizing Domain (DD)
atggttggttcgctaaactgcatcgtcgctgtgtcccagaacatgggcatcggcaagaacggggacctgccctggccaccgctcaggaatgaattcagatatttccagagaatgaccacaacctcttcggtagaaggtaaacagaatctggtgattatgggtaagaaggcctggttctccattcctgagaagaatcgacctttaaagggtagagctaatttagttctcagcagagaactcaaggaacctccacaaggagctcattttctttccagaagtctagatgatgccttaaaacttactgaacaaccagaattagcaaataaagtagacatggtctggatagttggtggcagttctgtttataaggaagccatgaatcacccaggccatcttaaactatttgtgacaaggatcatgcaagactttgaaagtgacacgttttttccagaaattgatttggagaaatataaacttctgccagaatacccaggtgttctctctgatgtccaggaggagaaaggcattaagtacaaatttgaagtatatgagaagaatgat

SEQ ID NO: 746 - DNA, 561 bp, Artificial Sequence
  Description of Artificial Sequence: Synthetic Destabilizing Domain (DD)
atggttggttcgctaaactgcatcgtcgctgtgtcccagaacatgggcatcggcaagaacggggacctgccctggccaccgctcaggaatgaattcagatatttccagaggatgaccacaacctcttcagtagaaggtaaacagaatctggtgattatgggtaagaagacctggttctccattcctgagaagaatcgacctttaaagggtagaattaatttagttcttagcagagaactcaaggaacctccacaaggagctcattttctttccagaagtttagatgatgccttaaaacttactgaacaaccagaattagcaaataaagtagacatggtctggatagttggtggcagttctgtttataaggaagccatgaatcacccaggccgtcttaaactatttgtgacaaggatcatgcaagactttggaagtgacacgttttttccagaaattgatttggagaaatataaacttctgccagaatacccaggtgttctctctgatgtccaggaggagaaaggcattaagtacaaatttgaagtatatgagaagaatgat

SEQ ID NO: 747 - DNA, 561 bp, Artificial Sequence
  Description of Artificial Sequence: Synthetic Destabilizing Domain (DD)
atggttggttcgctaaactgcatcgtcgctgtgtcccagaacatgggcatcggcaagaacggggacctgccctggccaccgctcaggaatgaattcagatacttccagagaatgaccacaacctcttcagtagaaggtaaacagaatctggtgattatgggtaagaagacctggttctccattcctgagaagaatcgacctttaaagggtagaattaatttagttctcagcagagaactcaaggaacctccacaaggagctcattttctttccagaagtctagatgatgccttaaaacttactgaacaaccagaattagcaaataaagtagacatggtctggatagttggtggcagttctgtttataaggaagccatgaatcacccaggccatcttaaactatttgtgagaaggatcatgcaagaccttgaaagtgacacgttttttccagaaattgatttggagaaatataaacttctgccagaatacccaggtgttctctctgatgtccaggaggagaaaggcattaagtacaaatttgaagtatatgagaagaatgat

SEQ ID NO: 748 - DNA, 561 bp, Artificial Sequence
  Description of Artificial Sequence: Synthetic Destabilizing Domain (DD)
atggttggttcgctaaactgcatcgtcgctgtgtcccagaacatgggcatcggcaagaacggggacctgccctggccaccgctcaggaatgaattcagatatttccagagaatgaccacaacctcttcagtagaaggtaaacagaatctggtgattatgggtaagaagacctggttctccattcctgagaagaatcgacctttaaagggtagaattaatttagttctcagcagagaactcaaggaacctccacaaggagctcattttctttccagaagtctagatgatgccttaaaacttactgaacaaccagaattagcaaataaagtagacatggtctggatagttggtggcagttctgtttataaggaagccatgaatcacccaggccatcttaaactatttgtgacaaggatcatgcaagactttgaaagtgacacgttttttccagaaattgatttggagaaatataaacttctgccagaatacccaggtgttctctctgatgtccaggaggagaaaggcattaagcacaaatttggagtatatgagaagaatgat

SEQ ID NO: 749 - DNA, 561 bp, Artificial Sequence
  Description of Artificial Sequence: Synthetic Destabilizing Domain (DD)
atggttggttcgctaaactgcatcgtcgctgtgtcccagaacatgggcatcggcaagaacggggacctgccctggccaccgctcaggaatgaattcagatatttccagagaatgaccacaacctcttcagtagaaggtaaacagaatctggtgattatgggtaagaagacctggttctccattcctgagaagaatcgacctttaaagggtagaattaatttagttctcagcagagaactcaaggagcctccacaaggagctcattttctttccagaagtctagatgatgccttaaaacttactgaacaaccagaattagcaaataaagtagacatggtctggatagttggtggcagttctgtttataaggaagccatgaatcacccaggccatcttaaactatttgtgacaaggatcatgcaagacttcgaaagtgacacgttttttccagaaattgatttggagaaatataaacttctgccagaatacccaggtgttctctctgatgtccaggaggagaaaggcattaagtacaaatttgaagtacatgaggagaatgat

SEQ ID NO: 750 - DNA, 561 bp, Artificial Sequence
  Description of Artificial Sequence: Synthetic Destabilizing Domain (DD)
atggttggttcgctaaactgcatcgccgctgtgtcccagaacatgggcatcggcaagaacggggacctgccctggccaccgctcaggaatgaattcagatatttccagagaatgaccacaacctcttcagtagaaggtaaacagaatctggtgattatgggtaagaagacctggttctccattcctgagaagaatcgacctttaaagggtagaattaatttagttctcagcagagaactcaaggaacctccacaaggagctcattttctttccagaaggctagatgatgccttaaaacttactgaacaaccagaattagcaaataaagtagacatggtctggatagttggtggcagttctgtttataaggaagccatgaatcacccaggccatcttaaactatttgtgacaaggatcatgcaagactttgaaagtgacacgttttttctagaaattgatttggagaaatataaacttctgccagaatacccaggtgttctctctgatgtccaggaggagaaaggcattaagtacaaatttgaagtatatgagaagaatgat

SEQ ID NO: 751 - DNA, 561 bp, Artificial Sequence
  Description of Artificial Sequence: Synthetic Destabilizing Domain (DD)
atggttggttcgctaaactgcgtcgtcgctgtgtcccagaacatgggcatcggcaagaacggggacctgccctggccaccgctcaggaatgaattcagatatttccagagaatgaccacaacctcttcagtagaaggtaaacagaatctggtgattatgggtaagaagacctggttctccattcctgagaagaatcgacctttaaagggtagaattaatttagttctcagcagagaactcaaggaacctccacaaggagctcattttctttccagaagtctagatgatgccttaaaacttactgaacaaccagaattagcaaataaagtagacatggtctggatagttggtggcagttctgtttataaggaagccatgaatcacccaggccatcttgaactatttgtgacaaggatcatgcaagactttgaaagtgacacgttttttccagaaattgatttggagaaatataaacttctgccagaatgcccaggtgttctctctgatgtccaggaggagaaaggcattaagtacaaatttgaagtatatgagaagaatgat

SEQ ID NO: 752 - DNA, 561 bp, Artificial Sequence
  Description of Artificial Sequence: Synthetic Destabilizing Domain (DD)
atggttggctcgctaaactgcatcgtcgctgtgtcccagaacatgggcatcggcaagaacggggactcgccctggccaccgctcaggaatgaattcagatatttccagagaatgaccacaacctcttcagtagaaggtaaacagaatctggtgattatgggtaagaagacctggttctccattcctgagaagaatcgacctttaaagggtagaattaatttagttctcagcagagaactcaaggaacctccacaaggagctcattttctttccagaagtctagatgatgccttaaaacttactgaacaaccagaattagcaaataaagtagacatggtctggatagttggtggcagttctgcttataaggaagccatgaatcacccaggccatcttaaactatttgtgacaaggatcatgcaagactttgaaagtgacacgttttttccagaaattgatttggagaaatgtaaacttctgccagaatacccaggtgttctctctgatgtccaggaggagaaaggcattaagtacaaatttgaagtatatgagaagaatgat

SEQ ID NO: 753 - DNA, 561 bp, Artificial Sequence
  Description of Artificial Sequence: Synthetic Destabilizing Domain (DD)
atggttggttcgctaaactgcatcgtcgctgtgtcccagaacatgggcatcggcgagaacggggacctgccctggccaccgctcaggaatgaattcagatatttccagagaatgaccacaacctcttcagtagaaggtaaacagaatctggtgattatgggtaagaagacctggttctccattcctgagaagaatcgacctttaaagggtagaattaatttagttctcagcagagaactcaaggaacctccacaaggagctcatcttctttccagaagtctagatgatgccttaaaacttactgaacaaccagaattagcaaataaagtagacatggtctggatagttggtggcagttctgtctataaggaagccatgaatcacccaggccatcttaaactatttgtgacaaggatcatgcaagactttgaaagtgacacgttttttccagaaattgatttggagaaatataaacttctgccagaatacccaggtgttctctctgatgtccaggaggagaaaggcattaagtacaaatttggagtatatgagaagaatgat

SEQ ID NO: 754 - DNA, 561 bp, Artificial Sequence
  Description of Artificial Sequence: Synthetic Destabilizing Domain (DD)
atggttggttcgctgaactgcatcgtcgctgtgtcccagaacatgggcatcggcaagaacggggacctgccctggccaccgctcaggaatgaattcagatatttccagagaatgaccacaacctcctcagtagaaggtaagcagaatctggtgattatgcgtaagaagacctggttctccattcctgagaagaatagacctttaaagggtagaattaatttagttctcagcagagaactcaaggaacctccacaaggagcccattttctttccagaagtctagatgatgccttaaaacttactgaacaaccagaattagcaaataaagtagacatggtctggttagttggtggcagttctgtttataaggaagccatgaatcacccaggccatcttaaactatttgtgacaaggatcgtgcaagactttgaaagtgacacgttttttccagaaattgatttggagaaatataaacttctgccagaatacccaggtgttctctgtgatgtccaggaggagaaaggcattaagtacaaatttgaggtatatgagaagaatgat

SEQ ID NO: 755 - DNA, 561 bp, Artificial Sequence
  Description of Artificial Sequence: Synthetic Destabilizing Domain (DD)
atggttggttcgctaaactgcatcgtcgctgtgtcccagaacatgggcatcggcaagaacggggacctgccctggccaccgctcaggaatgaattcagatacttccagagaatgaccacaacctcttcagtagaaggtaaacagaatctggtgattatgggtaagaagacctggttctccattcctgagaagaatcgacctttaaagggtagaattaatttagtcctcagcagagaactcaaggaacctccacaaggagctcattttctttccagaagtctagatgatgccttaaaacttactgaacaaccagaattagcaaataaagcagacatggtctggatagttggtggcagttctgtttataaggaagccatgaatcacccaggccatcttaaactatttatgacgaggatcatgcaagactttgaaagtgacacgttttttccagaaattgacctggagaaatataaactcctgccagaatacccaggtgttctctctgatgtccaggaggagaaaggcattaggtacaaatttgaagtatatgagaagaatgat

SEQ ID NO: 756 - DNA, 561 bp, Artificial Sequence
  Description of Artificial Sequence: Synthetic Destabilizing Domain (DD)
atggttggttcgctaaactgcatcgtcgctgtgtcccagaacatgggcatcggcaagaacggggacctgccctggccaccgctcaggaatgaattcagatatttccagagaatgaccacaacctcttcagtagaaggtaaacaggatctggtgattatgggtaagaagacctggtcctccattcctgagaagaatcgacctttaaagggtagaattaatttagttctcagcagagaactcaaggaacctccacaaggagctcattttctttccagaagtctagatgatgccttaaaacttactgaacaaccagaattagcaaataaagtagacatggtctggatagttggtggcagttctgtttataaggaagccatgaatcacccaggccatcttaaactgtttgtgacaaggatcatgcaagactttgaaagtgacacgttttttccagaaattggtttggagaaatataaacttctgccagaatacccaggtgttctctctgatgtccaggaggagaaaggcattaagtacaaatttgaagtatatgagaagaatgat

SEQ ID NO: 757 - DNA, 561 bp, Artificial Sequence
  Description of Artificial Sequence: Synthetic Destabilizing Domain (DD)
atggttggttcgctaaactgcatcgtcgctgtgtcccagaacatgggcatcggcaagaacgaggacctgccctggccaccgctcaggaatgaattcagatatttccagagaatgaccacaacctcttcagtagaaggtaaacagaatctggtgattatgggtaagaagacctggttctccattcctgagaagaatcgacctttaaagggtagagttaatttagttcttagcagagaactcaaggaacctccacaaggagctcattttctttccagaagtctagatgatgccttaaaacttactgaacaaccagaattagcaaataaagtagacatggtctggatagttggtggcagttccgtttataaggaagccatgaatcacccaggccatcttaaactatttgtgacaaggatcatgcaagactttgaaagtgacacgttttttccagaaattgatttggagaaatataaacttctgccagaatacccaggcgttctctctgatgtccaggaggagaaaggcactaagtacaaatttgaagtatatgagaagaatgat

SEQ ID NO: 758 - DNA, 561 bp, Artificial Sequence
  Description of Artificial Sequence: Synthetic Destabilizing Domain (DD)
atggttggttcgctaaactgcatcgtcgctgtgtcccagaacatgggcatcggcaagaacggggacctgccctggccaccgctcaggaatgaattcagatatttccagagaatgaccacaacctcttcagtagaaggtaaacagaatctggtgattatgggtaagaagacctggttctccattcctgagaagaatcgacctttaaagggtagaattaatttagttctcagcagagaactcaaggaacctccacaaggagcccattttctctccagaagtctggatgatgccctaaaacctactggacgatcaggattagcagataaagtagacatggcccggatagttggcggcagctctgtttgtaaggaagccataaggtacccaggccaccctaagctacctgtgacaaggaccatgcaagactttgaaagtgacacgtctcttccagaagttgccttggagaagtataagcttctgccagaatacccaggtgtgctctctggtgcccaggaggagaagggcgctaggtacaagtttgaagcatacgaaaggagtgat

SEQ ID NO: 759 - DNA, 561 bp, Artificial Sequence
  Description of Artificial Sequence: Synthetic Destabilizing Domain (DD)
atggctggttcgctaaactgcatcgtcgctgtgtcccagaacatgggcatcggcaagaacggggacctgccctggccaccgctcaggaatgaattcggatatttccggagaatgaccacaacctcttcagtagaaggtaaacagaatctggtgattatgggtaagaagacctggttctccattcctgagaagaatcgacctttaaagggtagaattaatttagttctcagcagagaactcaaggaacctccacaaggagctcattttctttccagaagtctagatgatgccttaaaacctactgaacaaccagaattagcaaataaagtagacatggtctggatagttggtggcagttctgtttataaggaagccatgaatcacccaggccatcttaaactatttgtgacaaggatcatgcaagactttgaaagtgacacgttttttccagaaattgatttggagaaatataaacttctgccagaatacccaggtgttctctctgatgtccaggaggagaagggcattaagtacaaatttgaagtatatgagaggaatgat

SEQ ID NO: 760 - DNA, 561 bp, Artificial Sequence
  Description of Artificial Sequence: Synthetic Destabilizing Domain (DD)
atggttggttcgctaaactgcatcgtcgctgtgtcccagaacatgagcgtcggcaagaacggggacctgccctggccaccgctcaggaatgaattcagatattttcagagaatgaccacaacctcttcagtagaaggtaaacagaatctggtgattatgggtaagaagacctggttctccattcctgagaagaatcgacctttaaagggtagaattaatttagttctcagcagagaactcaaggaacctccacaaggagctcatcttctttccagaagtctagatggtgccttaaaacttactgagcaaccagaattagcaaataaagtagacatggtctggatagttggtggcagttctgtttatgaggaagccatgaatcacccaggccatcttaaactatttgtgacaaggatcgtgcaagactttgagagtggcacgtttttcccagaaattgatttggagagatataaacttctgccagaatacccaggtgttctctctgatgtccaggaggagaaaggcattaagtacaaatttgaagtatatgagaagaatgat

SEQ ID NO: 761 - DNA, 561 bp, Artificial Sequence
  Description of Artificial Sequence: Synthetic Destabilizing Domain (DD)
atggttggttcgctaaactgcatcgtcgctgtgtcccagaacatgggcatcggcaagaacggggacctgccctggccaccgctcaggaatgaattcagatatctccagggaatgaccacaacctcttcagtagaaggtaaacagaatctggtgattatgggtaagaagacctggttctccattcctgagaaggctcgaccttcagagggtggaattaatttagttctcagtagagaacccaaggaacctccacaaggagctcatttcctttccagaagtctagatgatgccttaggacttactgaacaaccggaattagcaaataaagtagacatggtctggatagttgatggcagctctgtttataaggaagccatgaatcacccaggccaccctaaactatttgtgacaagggtcatacaaggctttgaaagtggcacgttttttccagaaattgatttggagaaatataaacttctgccagaatacccaggtgttctctctgacgtccaggaggggaaaggcattaagtacaaatttgaagtatatgagaagaatggt

SEQ ID NO: 762 - DNA, 561 bp, Artificial Sequence
  Description of Artificial Sequence: Synthetic Destabilizing Domain (DD)
atggttggttcgctaaactgcatcgtcgctgtgtcccagaacatgggcaacggcaagaacggggacctgccctggccaccgctcaggaatgaattcagatatttccagagaatgaccacaacctcttcagtagaaggtaaacagaatctggtgattatgggtaagaagacctggttctccattcctgagaagaatcgacctttaaagggtagaattaatttagttctcagcagagaactcaaggaacctccacaaggagctcattttctttccagaagtctggatgatgcctcaagacttactgaacaaccagaattagccaataaagtagacacagtctggatagttggtggcagttctgtttataaggaagccatgaatcacccaggccatcttaaactatttgtgacaaggatcatgcaagactttgaaagtgacacgttttttccaggaattgatttggagaaatataaacttctgccaggatacccaggtgttctctctgatgtccagggggagaaaggcattaagtacaaatttgaagtatatgagaagaatgat

SEQ ID NO: 763 - DNA, 561 bp, Artificial Sequence
  Description of Artificial Sequence: Synthetic Destabilizing Domain (DD)
atggttggttcgctaaactgcatcgtcgctgtgtcccagaacatgggcatcggcaagaacggggacctgccctggccaccgctcaggaatgaattcagatatttccagagaatgaccacaacctcttcagtagaaggtaaacagaatctggtgattatgggtaagaagacctggttctccattcctgagaagaatcgacctttaaagggtagaattaatttagttctcagcagagaactcaaggaacctccacaaggagctcattttctttccagaagtctagatgatgccttaaaacttactgaacaaccagaattagcaaataaagtagacatggtctggatagttggtggcagttctgtttataaggaagccatgaatcacccaggccatcttaaactatttgtgacagggatcatgcaaggctctgaaagtgacacgttttttccagaaattgatttggagagatatgaacttctgccaggatacccaggtgctctctctgatgttcaggaggagaaaggcattgagtgcaaatttgaagtatatgaggagagtgac

SEQ ID NO: 764 - DNA, 561 bp, Artificial Sequence
  Description of Artificial Sequence: Synthetic Destabilizing Domain (DD)
atggttggttcgctaaactgcatcgtcgctgtgtcccagaacatgggcatcggcaagaacggggacctgccctggccaccgctcaggaatgaattcagatatttccagagaatgaccacaacctcttcagtagaaggtaaacagaatctggtgattatgggtaagaagacctggttctccattcctgagaagaatcgacctttaaagggtagaattaatttagttctcagcagagagctcagggaacctccacaaggagctcattttctttccagaagtctagatgatgccttaagacctactggacaaccagaattagcagataaagtagacatggtctggatagttggtggcagttctgtttatagggaagccatgaatcgcccaggccatcttaaactgtttgtaacaaggatcatgcaaggctttgaaagtgacacgttttttccagaaattgatttggagaaatataagcttctgccagaatacccaggtgttctctctgatgtccaggaggagaaaggcattaagtacaaacttgaagtgtatgaggagaatgat

SEQ ID NO: 765 - DNA, 561 bp, Artificial Sequence
  Description of Artificial Sequence: Synthetic Destabilizing Domain (DD)
atggttggttcgctaaactgcatcgtcgctgtgtcccagagcatgggcatcggcaagaacggggacctgtcctggccaccgctcaggaatgaattcagatatctccagagaatgaccacaacctcttcagtagaaggtaaacagaatctggtgattacgggtaaggagacctggttctccattcctgagaagaatcgacctttaaagggtagaatcaatttagtcctcagcagagagctcaaggaacctccacaaggagctcattttctttccgggggtctagatgatgccttaaaacttactgaacaaccagaattagcaaataaagtagacatggtctggatagttggtggcagttctgtttataaggaagccatgagttacccaggccatcttaaactacttgtgacaaggatcatgcaagactctgaaagtgacacgttttttccagaaattgatttggagaaatataaacctccgccagaatacccaggtgttctctctgatgtccaggaggcgaaaggcattaagtacaaacttgaagtatatgagaagaatgat

SEQ ID NO: 766 - DNA, 561 bp, Artificial Sequence
  Description of Artificial Sequence: Synthetic Destabilizing Domain (DD)
atggctggttcgctaaactgcatcgtcgctgtgtcccagaatatgggcgtcggcaagaacggggacctgccctggccaccgctcagggatggattcagatatttccggagaatgaccacaacctcttcagtagaaggtaaacagaatctggtgattatgggtaagaagacctggtcctccattcctgagaagaatcgacctttagagggtagaactaatttagttctcagcagagaactcaaggaacctccacaaggagcttatcttctttccagaagtctagatgatgccttaaaacttactgagcagccagaattagcagatgaagcaggcatggtctgggtagttggtggcagttctgttgataaggaagccatgaatcacccaggccatcccaaactatctgtgacaaggatcgtgcaagactttggaagtgacgcgttttttccagaaattgatttggagaaatgcaaacttctgccagaatacccaggtgttctctctgatgcccaggaggagagaggcattaagtacaaatttgaagtatacgagaagagtgac

SEQ ID NO: 767 - DNA, 561 bp, Artificial Sequence
  Description of Artificial Sequence: Synthetic Destabilizing Domain (DD)
atggttggttcgctaaactgcatcgtcgctgtgtcccagaacatgggcatcggcaagaacggggacctgccctggccaccgcccaggcatgaattcagatatttccagagagtgaccacaacctcttcagcagaaggtaaacagaatctggtgattatgggcaagaagacctggttctccatccctgagaagaatcgaccttcaaagggtagaattggtttagttctcagcggagaactcaaggaacctccacagggagcccactttctctccaggagtctagatgataccttaagacttactgaacaaccagaattaacgaatagagtaaacatggtctggatagttggtggcagttctgtttataaggaggccatgaatcacccaggccaccttagaccagttgtgacaaggatcatgcaggactttgaaagcgacgcgttttttccagaagttgacttggagaaatatagacttctaccagaatacccaggtgttctctctgatgtccagggggagaaaggcattaagtacaaatttgaagcatataggaagaatgat

SEQ ID NO: 768 - DNA, 558 bp, Artificial Sequence
  Description of Artificial Sequence: Synthetic Destabilizing Domain (DD)
atggttggctcgctaaactgcatcgtcactgtgtcccggagcatgggcatcggcaaggacggggacctgtcctggccaccgctcaggagtgaattcaggtactttcagagaacgaccgcaacctcttcagtagaaggtagacagagtctggtgatcatgggcaagaggacctggttctccactcctgagaggaatcgacccttaaggggtagagctaacttagttctcagcggagagctcaagggacctccacaaggagctcatcttctttccagaagtctagatggtgccttaaaacttactgaacagccagagttagcagataaagtagacgtggtccggatagttggtggcagttctgttgatgaggaagccatgaatcacccaggccatcttaaactatttgtgacaagagtcatgcggggctttgaaagtgatacgctttttccaggaatcgacttggggaaacgtaaacttctgccagaatacccaggtgttctctctgatgtccgggaggagaaaggcattaagtacaaacttgaagtatgtgggaataat

SEQ ID NO: 769 - DNA, 558 bp, Artificial Sequence
  Description of Artificial Sequence: Synthetic Destabilizing Domain (DD)
gttggttcgctaaactgcatcgtcgctgtgtcccagaacatgggcgtcggcaagaacggggacctgccctggccaccgctcaggaatgaattcagatatttccagagaatgaccacaacctcttcagtagaaggtaaacagaatctggtgattatgggtaagaagacctggttctccattcctgagaagaatcgacctttaaagggtagaattaatttagttctcagcagagaactcaaggaacctccacaaggagctcattttctttccagaagtctagatgatgccttaaaacttactgaacaaccagaattagcaaataaagtagacatggtctggatagttggtggcagttctgttattaaggaagccatgaatcacccaggccatcttaaactatttgtgacaaggatcatgcaagactttgaaagtgacacgttttttccagaaattgatttggagaaatataaacttctgccagaatacccaggtgttctctctgatgtccaggaggagaaaggcattaagtacaaatttgaagtatatgagaagaatgat

SEQ ID NO: 770 - DNA, 561 bp, Artificial Sequence
  Description of Artificial Sequence: Synthetic Destabilizing Domain (DD)
gttggttcgctaaactgcatcgtcgctgtgtcccagaacatgggcatcggcaagaacggggacctgccctggccaccgctcaggaatgaattcagatatttccagagaatgaccacaacctcttcagtagaaggtaaacagaatctggtgattatgggtaagaagacctggttctccattcctgagaagaatcgacctttaaagggtagaattaatttagttctcagcagagaactcaaggaacctccacaaggagctcattttctttccagaagtctagatgatgccttaaaacttactgaacaaccagaattagcaaataaagtagacatggtctggatagttggtggcagttctgtttataaggaagccatgaatcacccaggccatcttaaactatttgtgacaaggatcatgcaagactttgaaagtgacacgttttttccagaaattgatttggagaaatataaacttctgccaggatacccaggtgttctctctgatgtccaggaggagaaaggctttaagtacaaatttgaagtatatgagaagaatgattga

SEQ ID NO: 771 - DNA, 561 bp, Artificial Sequence; identical to SEQ ID NO: 770
  Description of Artificial Sequence: Synthetic Destabilizing Domain (DD)

SEQ ID NO: 772 - DNA, 558 bp, Artificial Sequence
  Description of Artificial Sequence: Synthetic Destabilizing Domain (DD)
gttggttcgctaaactgcatcgtcgctgtgtcccagaacatgggcatcggcaagaacggggacctgccctggccaccgctcaggaatgaattcagatatttccagagaatgaccacaacctcttcagtagaaggtaaacagaatctggtgattatgggtaagaagacctggttctccattcctgagaagaatcgacctttaaagggtagaattaatttagttctcagcagagaactcaaggaacctccacaaggagctcattttctttccagaagtctagatgatgccttaaaacttactgaacaaccagaattagcaaataaagtagacatggtctggatagttggtggcagttctgtttataaggaagccatgaatcacccaggccatcttaaactatttgtgacaaggatcatgcaagactttgaaagtgacacgttttttccagaaattgatttggagaaatataaacttctgccagaatacccaggtgttctctctgatgtccaggaggagaaaggcattaagtacaaatttgaagtatatgaggagaatgat

SEQ ID NO: 773 - DNA, 561 bp, Artificial Sequence
  Description of Artificial Sequence: Synthetic Destabilizing Domain (DD)
gttggttcgctaaactgcatcgtcgctgtgtcccagaacatgggcatcggcaagaacggggacctgccctggccaccgctcaggaatgaattcagatatttccagagaatgaccacaacctcttcagtagaaggtaaacagaatctggtgattatgggtaagaagacctggttctccattcctgagaagaatcgacctttaaagggtagaattaatttagttctcagcagagaactcaaggaacctccacaaggagctcattttctttccagaagtctagatgatgccttaaaacttactgaacaaccagaattagcaaataaagtagacatggtctggatagttggtggcagttctgttattaaggaattcatgaatcacccaggccatcttaaactatttgtgacaaggatcatgcaagactttgaaagtgacacgttttttccagaaattgatttggagaaatataaacttctgccagaatacccaggtgttctctctgatgtccaggaggagaaaggcattaagtacaaatttgaagtatatgagaagaatgattga

SEQ ID NO: 774 - DNA, 558 bp, Artificial Sequence
  Description of Artificial Sequence: Synthetic Destabilizing Domain (DD)
gttggttcgctaaactgcatcgtcgctgtgtcccagaacatgggcatcggcaagaacggggacctgccctggccaccgctcaggaatgaattcagatatttccagagaatgaccacaacctcttcagtagaaggtaaacagaatctggtgattatgggtaagaagacctggttctccattcctgagaagaatcgacctttaaagggtagaattaatttagttctcagcagagaactcaaggaacctccacaaggagctcattttctttccagaagtctagatgatgccttaaaacttactgaacaaccagaattagcaaataaagtagacatggtctggatagttggtggcagttctgttattaaggaattcatgaatcacccaggccatcttaaactatttgtgacaaggatcatgcaagactttgaaagtgacacgttttttccagaaattgatttggagaaatataaacttctgccagaatacccaggtgttctctctgatgtccaggaggagaaaggcattaagtacaaatttgaagtatatgagaagaatgat

SEQ ID NO: 775 - DNA, 561 bp, Artificial Sequence
  Description of Artificial Sequence: Synthetic Destabilizing Domain (DD)
gttggttcgctaaactgcatcgtcgctgtgtcccagaacatgggcatcggcaagaacggggacctgccctggccaccgctcaggaatgaattcagatatttcttcagaatgaccacaacctcttcagtagaaggtaaacagaatctggtgattatgggtaagaagacctggttctccattcctgagaagttccgacctttaaagggtagaattaatttagttctcagcagagaactcaaggaacctccacaaggagctcattttctttccagaagtctagatgatgccttaaaacttactgaacaaccagaattagcaaataaagtagacatggtctggatagttggtggcagttctgttattaaggaagccatgaatcacccaggccatcttaaactatttgtgacaaggatcatgcaagactttgaaagtgacacgttttttccagaaattgatttggagaaatataaacttctgccagaatacccaggtgttctctctgatgtccaggaggagaaaggcattaagtacaaatttgaagtatatgagaagaatgattga

SEQ ID NO: 776 - DNA, 558 bp, Artificial Sequence
  Description of Artificial Sequence: Synthetic Destabilizing Domain (DD)
gttggttcgctaaactgcatcgtcgctgtgtcccagaacatgggcatcggcaagaacggggacctgccctggccaccgctcaggaatgaattcagatatttcttcagaatgaccacaacctcttcagtagaaggtaaacagaatctggtgattatgggtaagaagacctggttctccattcctgagaagttccgacctttaaagggtagaattaatttagttctcagcagagaactcaaggaacctccacaaggagctcattttctttccagaagtctagatgatgccttaaaacttactgaacaaccagaattagcaaataaagtagacatggtctggatagttggtggcagttctgttattaaggaagccatgaatcacccaggccatcttaaactatttgtgacaaggatcatgcaagactttgaaagtgacacgttttttccagaaattgatttggagaaatataaacttctgccagaatacccaggtgttctctctgatgtccaggaggagaaaggcattaagtacaaatttgaagtatatgagaagaatgat

SEQ ID NO: 777 - DNA, 558 bp, Artificial Sequence
  Description of Artificial Sequence: Synthetic Destabilizing Domain (DD)
gttggttcgctaaactgcatcgtcgctgtgtcccagaacatgggcatcggcaagaacggggacctgccctggccaccgctcaggaatgaattcagatatttccagagaatgaccacaacctcttcagtagaaggtaaacagaatctggtgattatgggtaagaagacctggttctccattcctgagaagaatcgacctttaaagggtagaattaatttagttctcagcagagaactcaaggaacctccacaaggagctcattttctttccagaagtctagatgatgccttaaaacttactgaacaaccagaattagcaaataaagtagacatggtctggatagttggtggcagttctgtttataaggaagccatgtatcacccaggccatcttaaactatttgtgacaaggatcatgcaagactttgaaagtgacacgttttttccagaaattgatttggagaaatataaacttctgccagaatacccaggtgttctctctgatgtccaggaggagaaaggcattaagtacaaatttgaagtatatgagaagaatgat

SEQ ID NO: 778 - DNA, 558 bp, Artificial Sequence
  Description of Artificial Sequence: Synthetic Destabilizing Domain (DD)
gttggttcgctaaactgcatcgtcgctgtgtcccagaacatgggcatcggcaagaacggggacctgccctggccaccgctcaggaatgaattcagatatttccagagaatgaccacaacctcttcagtagaaggtaaacagaatctggtgattatgggtaagaagacctggttctccattcctgagaagaatcgacctttaaagggtagaattaatttagttctcagcagagaactcaaggaacctccacaaggagctcattttctttccagaagtctagatgatgccttaaaacttactgaacaaccagaattagcaaataaagtagacatggtctggatagttggtggcagttctgtttataaggaagccatgaatcacccaggcagacttaaactatttgtgacaaggatcatgcaagactttggaagtgacacgttttttccagaaattgatttggagaaatataaacttctgccagaatacccaggtgttctctctgatgtccaggaggagaaaggcattaagtacaaatttgaagtatatgagaagaatgat

SEQ ID NO: 779 - DNA, 558 bp, Artificial Sequence
  Description of Artificial Sequence: Synthetic Destabilizing Domain (DD)
gttggttcgctaaactgcatcgtcgctgtgtcccagaacatgggcgtcggcaagaacggggacctgccctggccaccgctcaggaatgaattcagatatttccagagaatgaccacaacctcttcagtagaaggtaaacagaatctggtgattatgggtaagaagacctggttctccattcctgagaagaatcgacctttaaagggtagaattaatttagttctcagcagagaactcaaggaacctccacaaggagctcattttctttccagaagtctagatgatgccttaaaacttactgaacaaccagaattagcaaataaagtagacatggtctggatagttggtggcagttctgtttataaggaagccatgaatcacccaggccatcttaaactatttgtgacaaggatcatgcaagactttgaaagtgacacgttttttccagaaattgatttggagaaatataaacttctgccagaatacccaggtgttctctctgatgtccaggaggagaaaggcattaagtacaaatttgaagtatatgagaagaatgat

SEQ ID NO: 780 - DNA, 561 bp, Artificial Sequence
  Description of Artificial Sequence: Synthetic Destabilizing Domain (DD)
atggttggttcgctaaactgcatcgtcgctgtgtcccagaacatgggcatcggcaagaacggggacctgccctggccaccgctcaggaatgaattcagatatttccagagaatgaccacaacctcttcagtagaaggtaaacagaatctggtgattatgggtaagaagacctggttctccattcctgagaagaatcgacctttaaagggtagaattaatttagttctcagcagagaactcaaggaacctccacaaggagctcattttctttccagaagtctagatgatgccttaaaacttactgaacaaccagaattagcaaataaagtagacatggtctggatagttggtggcagttctgtttataaggaagccatgaatcacccaggccatcttaaactatttgtgacaaggatcatgcaagactttgaaagtgacacgttttttccagaaattgatttggagaaatataaacttctgccaggatacccaggtgttctctctgatgtccaggaggagaaaggctttaagtacaaatttgaagtatatgagaagaatgat

SEQ ID NO: 781 - protein, 186 aa, Artificial Sequence
  Description of Artificial Sequence: Synthetic Destabilizing Domain (DD)
VGSLNCIVAVSQNMGIGKNGDLPWPPLRNEFRYFKRMTTTSSVEGKQNLVIMGKKTWFSIPEKNRPLKGRINLVLSRELKEPPQGAHFLSRSLDDALKLTEQPELANKVDMVWIVGGSSVIKEAMNHPGHLKLFVTRIMQDFESDTFFPEIDLEKYKLLPEYPGVLSDVQEEKGIKYKFEVYEKND

SEQ ID NO: 782 - DNA, 207 bp, Artificial Sequence
  Description of Artificial Sequence: Synthetic Construct
acaacaaccccagcacccagacctccaacacctgcaccaaccatcgcaagccagcctctgtccctgaggcccgaggcatgtaggccagcagcaggaggcgccgtgcacacccggggcctggactttgcctgcgatatctatatctgggcaccactggcaggaacatgtggcgtgctgctgctgtccctggtcatcaccctgtattgc

SEQ ID NO: 783 - DNA, 207 bp, Artificial Sequence
  Description of Artificial Sequence: Synthetic Construct
accacaaccccagcaccccgcccaccaacacctgcaccaaccatcgcctcccagccactgtctctgaggcccgaggcatgtaggcctgcagcaggaggcgccgtgcacaccaggggcctggactttgcctgcgatatctacatctgggcacctctggcaggaacatgtggcgtgctgctgctgtccctggtcatcaccctgtattgc

SEQ ID NO: 784 - DNA, 207 bp, Artificial Sequence
  Description of Artificial Sequence: Synthetic Construct
accacgacgccagcgccgcgaccaccaacaccggcgcccaccatcgcgtcgcagcccctgtccctgcgcccagaggcgtgccggccagcggcggggggcgcagtgcacacgagggggctggacttcgcctgtgatatctacatctgggcgcccttggccgggacttgtggggtccttctcctgtcactggttatcaccctttactgc

SEQ ID NO: 785 - DNA, 126 bp, Artificial Sequence
  Description of Artificial Sequence: Synthetic Construct
aaacggggcagaaagaaactcctgtatatattcaaacaaccatttatgagaccagtacaaactactcaagaggaagatggctgtagctgccgatttccagaagaagaagaaggaggatgtgaactg

SEQ ID NO: 786 - DNA, 336 bp, Artificial Sequence
  Description of Artificial Sequence: Synthetic Construct
agagtgaagttcagcaggagcgcagacgcccccgcgtacaagcagggccagaaccagctctataacgagctcaatctaggacgaagagaggagtacgatgttttggacaagagacgtggccgggaccctgagatggggggaaagccgagaaggaagaaccctcaggaaggcctgtacaatgaactgcagaaagataagatggcggaggcctacagtgagattgggatgaaaggcgagcgccggaggggcaaggggcacgatggcctttaccagggtctcagtacagccaccaaggacacctacgacgcccttcacatgcaggccctgccccctcgc

SEQ ID NO: 787 - DNA, 321 bp, Artificial Sequence
  Description of Artificial Sequence: Synthetic Destabilizing Domain (DD)
ggcgtgcaggtggagacaatcagcccaggcgacggacgcacctttccaaagaggggacagacatgcgtggtgcactacaccggcatgctggaggatggcaagaaggtggactcctctagagatcggaataagccattcaagtttatgctgggcaagcaggaagtgatcagaggctgggaggagggagtggcacagatgtctgtgggacagcgggccaagctgacaatcagccctgactatgcatacggagcaaccggacacccaggaatcatcccaccacacgccacactggtgttcgatgtggagctgctgaagcctgag

SEQ ID NO: 788 - DNA, 474 bp, Artificial Sequence
  Description of Artificial Sequence: Synthetic Destabilizing Domain (DD)
atctccctgatcgccgccctggcagtggactacgtgatcggcatggagaacgccatgccctggaatctgcctgccgatctggcctggtttaagagaaacacactgaataagcccgtgatcatgggccggcacacctgggagtctatcggcaggcccctgcctggcaggaagaacatcatcctgtcctctcagcctggcacagacgatagagtgacctgggtgaagagcgtggacgaggcaatcgcagcatgtggcgatgtgcccgagatcatggtcatcggcggcggcagagtgatcgagcagttcctgcctaaggcccagaagctgtatctgacacacatcgacgccgaggtggagggcgacacccactttccagattacgagcccgacgattgggagtccgtgttctctgagtttcacgacgccgatgcccagaattcccactcttattgcttcgagatcctggagaggaga

SEQ ID NO: 789 - DNA, 321 bp, Artificial Sequence
  Description of Artificial Sequence: Synthetic Destabilizing Domain (DD)
ggagtgcaggtggagacaatctccccaggcgacggcagaacctttcccaagcggggccagacatgcgtggtgcactataccggcatgctggaggatggcaagaaggtggactcctctagagatcggaacaagccattcaagtttatgctgggcaagcaggaagtgatcagaggctgggaggagggagtggcacagatgtctgtgggacagcgggccaagctgacaatcagcccagactatgcatacggagcaaccggacaccctggaatcatccctccacacgccaccctggtgttcgatgtggagctgctgaagcctgag

SEQ ID NO: 790 - DNA, 72 bp, Artificial Sequence
  Description of Artificial Sequence: Synthetic Construct
atctacatctgggcaccactggcaggaacatgcggcgtgctgctgctgtccctggtcatcaccctgtattgt

SEQ ID NO: 791 - DNA, 474 bp, Artificial Sequence
  Description of Artificial Sequence: Synthetic Destabilizing Domain (DD)
atctccctgatcgccgccctggcagtggactacgtgatcggcatggagaacgccatgccctggaatctgcctgccgatctggcctggtttaagagaaacacactgaataagcccgtgatcatgggccggcacacctgggagagcatcggcagacctctgccaggccggaagaacatcatcctgtcctctcagcctggcacagacgatagagtgacctgggtgaagtccgtggacgaggcaatcgcagcatgcggcgatgtgcccgagatcatggtcatcggcggcggcagagtgatcgagcagttcctgcctaaggcccagaagctgtatctgacacacatcgacgccgaggtggagggcgacacccactttccagattacgagcccgacgattgggagtccgtgttctctgagtttcacgacgccgatgcccagaattcccactcttattgtttcgagatcctggagagaaga

SEQ ID NO: 792 - DNA, 72 bp, Artificial Sequence
  Description of Artificial Sequence: Synthetic Construct
atctacatctgggcacctctggcaggaacatgcggcgtgctgctgctgtctctggtcatcaccctgtattgt

SEQ ID NO: 793 - DNA, 474 bp, Artificial Sequence
  Description of Artificial Sequence: Synthetic Destabilizing Domain (DD)
atctccctgatcgccgccctggcagtggaccacgtgatcggcatggagaacgccatgccatggaatctgcccgccgatctggcctggttcaagcggaacaccctgaataagccagtgatcatgggcagacacacatgggagtctatcggcaggcccctgcctggacgcaagaacatcatcctgagctcccagcccggcaccgacgatagggtgacatgggtgaagtccgtggacgaggcaatcgcagcatgcggcgatgtgcccgagatcatggtcatcggcggcggcagagtgtacgagcagttcctgcctaaggcccagaagctgtatctgacccacatcgacgccgaggtggagggcgacacacactttcctgattacaagccagacgattgggagtccgtgttctctgagtttcacgacgccgatgcccagaattctcacagctattgttttgagatcctggagcggaga

SEQ ID NO: 794 - DNA, 321 bp, Artificial Sequence
  Description of Artificial Sequence: Synthetic Destabilizing Domain (DD)
ggagtgcaggtggagacaatcagcccaggcgacggaaggacattcccaaagaggggacagacctgcgtggtgcactacacaggcatgctgggcgatggcaagaaggtggacagctcccgggatagaaacaagcccttcaagtttatgctgggcaagcaggaagtgatcaggggatgggaggagggagtggcacagatgtccgtgggacagggcgccaagctgaccatctctcctgactacgcctatggagcaacaggacacccaggaatcatcccacctcacgccaccctggtgtttgatgtggagctgctggagctggag

SEQ ID NO: 795 - DNA, 558 bp, Artificial Sequence
  Description of Artificial Sequence: Synthetic Destabilizing Domain (DD)
gtgggctccctgaactgcatcgtggccgtgagccagaacatgggcatcggcaagaatggcgacctgccttggccacctctgaggaacgagttcagatactttcagaggatgaccacaaccagctccgtggagggcaagcagaacctggtcatcatgggcaagaagacatggttctctatccccgagaagaaccgccctctgaagggccggatcaatctggtgctgagcagagagctgaaggagccaccacagggagcacacttcctgagccggagcctggacgatgccctgaagctgaccgagcagcccgagctggccaacaaggtggacatggtgtggatcgtgggcggctctagcgtgatcaaggaggccatgaatcacccaggccacctgaagctgttcgtgacaagaatcatgcaggactttgagtccgataccttctttcccgagatcgacctggagaagtacaagctgctgcctgagtatccaggcgtgctgtctgatgtgcaggaggagaagggcatcaagtacaagttcgaggtgtatgagaagaatgat

SEQ ID NO: 796 - DNA, 558 bp, Artificial Sequence
  Description of Artificial Sequence: Synthetic Destabilizing Domain (DD)
gtgggctccctgaactgcatcgtggccgtgagccagaacatgggcatcggcaagaatggcgacctgccttggccacctctgaggaacgagttcagatactttcagaggatgaccacaaccagctccgtggagggcaagcagaacctggtcatcatgggcaagaagacatggttctctatccccgagaagaaccgccctctgaagggccggatcaatctggtgctgagcagagagctgaaggagccaccacagggagcacacttcctgagccggagcctggacgatgccctgaagctgaccgagcagcccgagctggccaacaaggtggacatggtgtggatcgtgggcggctctagcgtgatcaaggagttcatgaatcacccaggccacctgaagctgttcgtgacaagaatcatgcaggactttgagtccgataccttctttcccgagatcgacctggagaagtacaagctgctgcctgagtatccaggcgtgctgtctgatgtgcaggaggagaagggcatcaagtacaagttcgaggtgtatgagaagaatgat

SEQ ID NO: 797 - DNA, 558 bp, Artificial Sequence
  Description of Artificial Sequence: Synthetic Destabilizing Domain (DD)
gtgggctccctgaactgcatcgtggccgtgagccagaacatgggcatcggcaagaatggcgacctgccttggccacctctgaggaacgagttcagatactttaagaggatgaccacaaccagctccgtggagggcaagcagaacctggtcatcatgggcaagaagacatggttctctatccccgagaagaaccgccctctgaagggccggatcaatctggtgctgagcagagagctgaaggagccaccacagggagcacacttcctgagccggagcctggacgatgccctgaagctgaccgagcagcccgagctggccaacaaggtggacatggtgtggatcgtgggcggctctagcgtgatcaaggaggccatgaatcacccaggccacctgaagctgttcgtgacaagaatcatgcaggactttgagtccgataccttctttcccgagatcgacctggagaagtacaagctgctgcctgagtatccaggcgtgctgtctgatgtgcaggaggagaagggcatcaagtacaagttcgaggtgtatgagaagaatgat

SEQ ID NO: 798 - DNA, 558 bp, Artificial Sequence
  Description of Artificial Sequence: Synthetic Destabilizing Domain (DD)
gtgggctccctgaactgcatcgtggccgtgagccagaacatgggcatcggcaagaatggcgacctgccttggccacctctgaggaacgagttcagatactttttcaggatgaccacaaccagctccgtggagggcaagcagaacctggtcatcatgggcaagaagacatggttctctatccccgagaagttccgccctctgaagggccggatcaatctggtgctgagcagagagctgaaggagccaccacagggagcacacttcctgagccggagcctggacgatgccctgaagctgaccgagcagcccgagctggccaacaaggtggacatggtgtggatcgtgggcggctctagcgtgatcaaggaggccatgaatcacccaggccacctgaagctgttcgtgacaagaatcatgcaggactttgagtccgataccttctttcccgagatcgacctggagaagtacaagctgctgcctgagtatccaggcgtgctgtctgatgtgcaggaggagaagggcatcaagtacaagttcgaggtgtatgagaagaatgat

SEQ ID NO: 799 - DNA, 576 bp, Artificial Sequence
  Description of Artificial Sequence: Synthetic Construct
cgcccctctccctcccccccccctaacgttactggccgaagccgcttggaataaggccggtgtgcgtttgtctatatgttattttccaccatattgccgtcttttggcaatgtgagggcccggaaacctggccctgtcttcttgacgagcattcctaggggtctttcccctctcgccaaaggaatgcaaggtctgttgaatgtcgtgaaggaagcagttcctctggaagcttcttgaagacaaacaacgtctgtagcgaccctttgcaggcagcggaaccccccacctggcgacaggtgcctctgcggccaaaagccacgtgtataagatacacctgcaaaggcggcacaaccccagtgccacgttgtgagttggatagttgtggaaagagtcaaatggctctcctcaagcgtattcaacaaggggctgaaggatgcccagaaggtaccccattgtatgggatctgatctggggcctcggtgcacatgctttacatgtgtttagtcgaggttaaaaaaacgtctaggccccccgaaccacggggacgtggttttcctttgaaaaacacgatgataa

SEQ ID NO: 800 - DNA, 32 bp, Artificial Sequence
  Description of Artificial Sequence: Synthetic oligonucleotide
gcttgccacaacccacaaggagacgaccttcc

SEQ ID NO: 801 - DNA, 342 bp, Artificial Sequence
  Description of Artificial Sequence: Synthetic Payload sequence
aattgggtcaacgtgatcagcgacctgaagaagatcgaggacctgatccagagcatgcacatcgacgccacactgtacaccgagtccgatgtgcaccctagctgcaaagtgaccgccatgaagtgctttctgctggaactgcaagtgatcagcctggaaagcggcgacgccagcatccacgataccgtggaaaatctgatcatcctggccaacaacagcctgagcagcaacggcaatgtgaccgagagcggctgcaaagagtgcgaggaactggaagagaagaacatcaaagagttcctccagagcttcgtccacatcgtgcagatgttcatcaacaccagc

SEQ ID NO: 802 - DNA, 78 bp, Artificial Sequence; identical to SEQ ID NO: 718
  Description of Artificial Sequence: Synthetic Linker

SEQ ID NO: 803 - DNA, 711 bp, Artificial Sequence
  Description of Artificial Sequence: Synthetic Payload sequence
atcacctgtcctccacctatgagcgtggaacacgccgacatctgggtcaagagctacagcctgtacagcagagagcggtacatctgcaacagcggcttcaagagaaaggccggcacaagcagcctgaccgagtgtgtgctgaacaaggccacaaacgtggcccactggaccacacctagcctgaagtgcatcagagatcccgctctggttcaccagaggcctgctcctccatctacagtgacaacagctggcgtgacccctcagcctgagtctctgtctccatctggaaaagagcctgccgccagctctcccagctctaacaatactgctgccaccacagccgccatcgtgcctggatctcagctgatgcctagcaagagccctagcaccggcacaacagagatcagctctcacgagtctagccacggcaccccatctcagaccacagccaagaattgggagctgaccgcctctgcctctcatcagccacctggtgtttaccctcaaggccactctgataccaccgtggccatcagcacaagcacagtgctgctgtgtggactgtctgccgtgtctctgctggcctgctacctgaagtctagacagacacctcctctggccagcgtggaaatggaagccatggaagctctgcctgtgacatggggcaccagcagcagagatgaggacctcgagaattgcagccaccacctg

SEQ ID NO: 804 - protein, 486 aa, Artificial Sequence; identical to SEQ ID NO: 475
  Description of Artificial Sequence: Synthetic polypeptide

SEQ ID NO: 805 - protein, 677 aa, Artificial Sequence; identical to SEQ ID NO: 482
  Description of Artificial Sequence: Synthetic polypeptide

SEQ ID NO: 806 - protein, 488 aa, Artificial Sequence
  Description of Artificial Sequence: Synthetic polypeptide
MALPVTALLLPLALLLHAARPDIQMTQTTSSLSASLGDRVTISCRASQDISKYLNWYQQKPDGTVKLLIYHTSRLHSGVPSRFSGSGSGTDYSLTISNLEQEDIATYFCQQGNTLPYTFGGGTKLEITGGGGSGGGGSGGGGSEVKLQESGPGLVAPSQSLSVTCTVSGVSLPDYGVSWIRQPPRKGLEWLGVIWGSETTYYNSALKSRLTIIKDNSKSQVFLKMNSLQTDDTAIYYCAKHYYYGGSYAMDYWGQGTSVTVSSTTTPAPRPPTPAPTIASQPLSLRPEACRPAAGGAVHTRGLDFACDIYIWAPLAGTCGVLLLSLVITLYCKRGRKKLLYIFKQPFMRPVQTTQEEDGCSCRFPEEEEGGCELRVKFSRSADAPAYKQGQNQLYNELNLGRREEYDVLDKRRGRDPEMGGKPRRKNPQEGLYNELQKDKMAEAYSEIGMKGERRRGKGHDGLYQGLSTATKDTYDALHMQALPPRGS

SEQ ID NO: 807 - protein, 508 aa, Artificial Sequence
  Description of Artificial Sequence: Synthetic polypeptide
MALPVTALLLPLALLLHAARPDIQMTQTTSSLSASLGDRVTISCRASQDISKYLNWYQQKPDGTVKLLIYHTSRLHSGVPSRFSGSGSGTDYSLTISNLEQEDIATYFCQQGNTLPYTFGGGTKLEITGGGGSGGGGSGGGGSEVKLQESGPGLVAPSQSLSVTCTVSGVSLPDYGVSWIRQPPRKGLEWLGVIWGSETTYYNSALKSRLTIIKDNSKSQVFLKMNSLQTDDTAIYYCAKHYYYGGSYAMDYWGQGTSVTVSSTTTPAPRPPTPAPTIASQPLSLRPEACRPAAGGAVHTRGLDFACDIYIWAPLAGTCGVLLLSLVITLYCKRGRKKLLYIFKQPFMRPVQTTQEEDGCSCRFPEEEEGGCELRVKFSRSADAPAYKQGQNQLYNELNLGRREEYDVLDKRRGRDPEMGGKPRRKNPQEGLYNELQKDKMAEAYSEIGMKGERRRGKGHDGLYQGLSTATKDTYDALHMQALPPRGATNFSLLKQAGDVEENPGPGS

SEQ ID NO: 808 - protein, 497 aa, Artificial Sequence
  Description of Artificial Sequence: Synthetic polypeptide
MALPVTALLLPLALLLHAARPYPYDVPDYADIQMTQTTSSLSASLGDRVTISCRASQDISKYLNWYQQKPDGTVKLLIYHTSRLHSGVPSRFSGSGSGTDYSLTISNLEQEDIATYFCQQGNTLPYTFGGGTKLEITGGGGSGGGGSGGGGSEVKLQESGPGLVAPSQSLSVTCTVSGVSLPDYGVSWIRQPPRKGLEWLGVIWGSETTYYNSALKSRLTIIKDNSKSQVFLKMNSLQTDDTAIYYCAKHYYYGGSYAMDYWGQGTSVTVSSTTTPAPRPPTPAPTIASQPLSLRPEACRPAAGGAVHTRGLDFACDIYIWAPLAGTCGVLLLSLVITLYCKRGRKKLLYIFKQPFMRPVQTTQEEDGCSCRFPEEEEGGCELRVKFSRSADAPAYKQGQNQLYNELNLGRREEYDVLDKRRGRDPEMGGKPRRKNPQEGLYNELQKDKMAEAYSEIGMKGERRRGKGHDGLYQGLSTATKDTYDALHMQALPPRGS

SEQ ID NO: 809 - protein, 502 aa, Artificial Sequence
  Description of Artificial Sequence: Synthetic polypeptide
MALPVTALLLPLALLLHAARPDIQMTQTTSSLSASLGDRVTISCRASQDISKYLNWYQQKPDGTVKLLIYHTSRLHSGVPSRFSGSGSGTDYSLTISNLEQEDIATYFCQQGNTLPYTFGGGTKLEITGGGGSGGGGSGGGGSEVKLQESGPGLVAPSQSLSVTCTVSGVSLPDYGVSWIRQPPRKGLEWLGVIWGSETTYYNSALKSRLTIIKDNSKSQVFLKMNSLQTDDTAIYYCAKHYYYGGSYAMDYWGQGTSVTVSSTTTPAPRPPTPAPTIASQPLSLRPEACRPAAGGAVHTRGLDFACDIYIWAPLAGTCGVLLLSLVITLYCKRGRKKLLYIFKQPFMRPVQTTQEEDGCSCRFPEEEEGGCELRVKFSRSADAPAYKQGQNQLYNELNLGRREEYDVLDKRRGRDPEMGGKPRRKNPQEGLYNELQKDKMAEAYSEIGMKGERRRGKGHDGLYQGLSTATKDTYDALHMQALPPRSGESRRVRRNKRSKGS

SEQ ID NO: 810 - protein, 486 aa, Artificial Sequence; identical to SEQ ID NO: 475
  Description of Artificial Sequence: Synthetic polypeptide

SEQ ID NO: 811 - DNA, 591 bp, Artificial Sequence
  Description of Artificial Sequence: Synthetic Payload sequence
agaaacctgcctgtcgctacccccgaccccggaatgttcccctgcctgcaccactcccagaacctcctgagggccgtgtccaacatgctgcagaaggctagacagaccctcgaattctacccctgtaccagcgaggagatcgaccatgaggacatcaccaaggataagaccagcaccgtggaggcttgcctgcctctggagctgaccaaaaacgagagctgcctgaacagcagggaaaccagcttcattaccaacggctcctgcctggcctccaggaagacatccttcatgatggccctgtgcctcagcagcatctacgaggacctgaagatgtatcaggtggagtttaagaccatgaatgccaagctgctgatggaccctaagaggcagatcttcctggaccagaatatgctggccgtgattgacgagctgatgcaggccctcaactttaacagcgagaccgtgccccagaaaagcagcctcgaagagcctgacttctacaaaaccaagattaagctgtgtatcctgctgcacgccttcaggatcagggccgtgaccatcgacagggtgatgagctacctgaacgccagt

SEQ ID NO: 812 - DNA, 321 bp, Artificial Sequence
  Description of Artificial Sequence: Synthetic Destabilizing Domain (DD)
ggagtgcaggtggagacaatcagccccggcgatggcaggacctttcctaagcgcggccagacatgcgtggtgcactacaccggcatgctgggcgacggcaagaaggtggacagctcccgggatagaaataagcccttcaagtttatgctgggcaagcaggaagtgatcagaggctgggaggagggagtggcacagatgtctgtgggacagggcgccaagctgacaatcagcccagattacgcatatggagcaaccggacacccaggaatcatcccaccccacgccaccctggtgttcgacgtggagctgctggagctggag

SEQ ID NO: 813 - protein, 486 aa, Artificial Sequence; identical to SEQ ID NO: 475
  Description of Artificial Sequence: Synthetic polypeptide

SEQ ID NO: 814 - protein, 743 aa, Artificial Sequence
  Description of Artificial Sequence: Synthetic polypeptide
MALPVTALLLPLALLLHAARPDIQMTQTTSSLSASLGDRVTISCRASQDISKYLNWYQQKPDGTVKLLIYHTSRLHSGVPSRFSGSGSGTDYSLTISNLEQEDIATYFCQQGNTLPYTFGGGTKLEITGGGGSGGGGSGGGGSEVKLQESGPGLVAPSQSLSVTCTVSGVSLPDYGVSWIRQPPRKGLEWLGVIWGSETTYYNSALKSRLTIIKDNSKSQVFLKMNSLQTDDTAIYYCAKHYYYGGSYAMDYWGQGTSVTVSSTTTPAPRPPTPAPTIASQPLSLRPEACRPAAGGAVHTRGLDFACDIYIWAPLAGTCGVLLLSLVITLYCKRGRKKLLYIFKQPFMRPVQTTQEEDGCSCRFPEEEEGGCELRVKFSRSADAPAYKQGQNQLYNELNLGRREEYDVLDKRRGRDPEMGGKPRRKNPQEGLYNELQKDKMAEAYSEIGMKGERRRGKGHDGLYQGLSTATKDTYDALHMQALPPRGSGATNFSLLKQAGDVEENPGPLSKGEEDNMAIIKEFMRFKVHMEGSVNGHEFEIEGEGEGRPYEGTQTAKLKVTKGGPLPFAWDILSPQFMYGSKAYVKHPADIPDYLKLSFPEGFKWERVMNFEDGGVVTVTQDSSLQDGEFIYKVKLRGTNFPSDGPVMQKKTMGWEASSERMYPEDGALKGEIKQRLKLKDGGHYDAEVKTTYKAKKPVQLPGAYNVNIKLDITSHNEDYTIVEQYERAEGRHSTGGMDELYK

SEQ ID NO: 815 - protein, 885 aa, Artificial Sequence
  Description of Artificial Sequence: Synthetic polypeptide
MALPVTALLLPLALLLHAARPDIQMTQTTSSLSASLGDRVTISCRASQDISKYLNWYQQKPDGTVKLLIYHTSRLHSGVPSRFSGSGSGTDYSLTISNLEQEDIATYFCQQGNTLPYTFGGGTKLEITGGGGSGGGGSGGGGSEVKLQESGPGLVAPSQSLSVTCTVSGVSLPDYGVSWIRQPPRKGLEWLGVIWGSETTYYNSALKSRLTIIKDNSKSQVFLKMNSLQTDDTAIYYCAKHYYYGGSYAMDYWGQGTSVTVSSTTTPAPRPPTPAPTIASQPLSLRPEACRPAAGGAVHTRGLDFACDIYIWAPLAGTCGVLLLSLVITLYCKRGRKKLLYIFKQPFMRPVQTTQEEDGCSCRFPEEEEGGCELRVKFSRSADAPAYKQGQNQLYNELNLGRREEYDVLDKRRGRDPEMGGKPRRKNPQEGLYNELQKDKMAEAYSEIGMKGERRRGKGHDGLYQGLSTATKDTYDALHMQALPPRGSGATNFSLLKQAGDVEENPGPNWVNVISDLKKIEDLIQSMHIDATLYTESDVHPSCKVTAMKCFLLELQVISLESGDASIHDTVENLIILANNSLSSNGNVTESGCKECEELEEKNIKEFLQSFVHIVQMFINTSSGGGSGGGGSGGGGSGGGGSGGGSLQITCPPPMSVEHADIWVKSYSLYSRERYICNSGFKRKAGTSSLTECVLNKATNVAHWTTPSLKCIRDPALVHQRPAPPSTVTTAGVTPQPESLSPSGKEPAASSPSSNNTAATTAAIVPGSQLMPSKSPSTGTTEISSHESSHGTPSQTTAKNWELTASASHQPPGVYPQGHSDTTVAISTSTVLLCGLSAVSLLACYLKSRQTPPLASVEMEAMEALPVTWGTSSRDEDLENCSHHL

SEQ ID NO: 816 - protein, 907 aa, Artificial Sequence
  Description of Artificial Sequence: Synthetic polypeptide
MALPVTALLLPLALLLHAARPDIQMTQTTSSLSASLGDRVTISCRASQDISKYLNWYQQKPDGTVKLLIYHTSRLHSGVPSRFSGSGSGTDYSLTISNLEQEDIATYFCQQGNTLPYTFGGGTKLEITGGGGSGGGGSGGGGSEVKLQESGPGLVAPSQSLSVTCTVSGVSLPDYGVSWIRQPPRKGLEWLGVIWGSETTYYNSALKSRLTIIKDNSKSQVFLKMNSLQTDDTAIYYCAKHYYYGGSYAMDYWGQGTSVTVSSTTTPAPRPPTPAPTIASQPLSLRPEACRPAAGGAVHTRGLDFACDIYIWAPLAGTCGVLLLSLVITLYCKRGRKKLLYIFKQPFMRPVQTTQEEDGCSCRFPEEEEGGCELRVKFSRSADAPAYKQGQNQLYNELNLGRREEYDVLDKRRGRDPEMGGKPRRKNPQEGLYNELQKDKMAEAYSEIGMKGERRRGKGHDGLYQGLSTATKDTYDALHMQALPPRGSGATNFSLLKQAGDVEENPGPMLLLVTSLLLCELPHPAFLLIPNWVNVISDLKKIEDLIQSMHIDATLYTESDVHPSCKVTAMKCFLLELQVISLESGDASIHDTVENLIILANNSLSSNGNVTESGCKECEELEEKNIKEFLQSFVHIVQMFINTSSGGGSGGGGSGGGGSGGGGSGGGSLQITCPPPMSVEHADIWVKSYSLYSRERYICNSGFKRKAGTSSLTECVLNKATNVAHWTTPSLKCIRDPALVHQRPAPPSTVTTAGVTPQPESLSPSGKEPAASSPSSNNTAATTAAIVPGSQLMPSKSPSTGTTEISSHESSHGTPSQTTAKNWELTASASHQPPGVYPQGHSDTTVAISTSTVLLCGLSAVSLLACYLKSRQTPPLASVEMEAMEALPVTWGTSSRDEDLENCSHHL

SEQ ID NO: 817 - protein, 903 aa, Artificial Sequence
  Description of Artificial Sequence: Synthetic polypeptide
MALPVTALLLPLALLLHAARPDIQMTQTTSSLSASLGDRVTISCRASQDISKYLNWYQQKPDGTVKLLIYHTSRLHSGVPSRFSGSGSGTDYSLTISNLEQEDIATYFCQQGNTLPYTFGGGTKLEITGGGGSGGGGSGGGGSEVKLQESGPGLVAPSQSLSVTCTVSGVSLPDYGVSWIRQPPRKGLEWLGVIWGSETTYYNSALKSRLTIIKDNSKSQVFLKMNSLQTDDTAIYYCAKHYYYGGSYAMDYWGQGTSVTVSSTTTPAPRPPTPAPTIASQPLSLRPEACRPAAGGAVHTRGLDFACDIYIWAPLAGTCGVLLLSLVITLYCKRGRKKLLYIFKQPFMRPVQTTQEEDGCSCRFPEEEEGGCELRVKFSRSADAPAYKQGQNQLYNELNLGRREEYDVLDKRRGRDPEMGGKPRRKNPQEGLYNELQKDKMAEAYSEIGMKGERRRGKGHDGLYQGLSTATKDTYDALHMQALPPRGSGATNFSLLKQAGDVEENPGPMDWTWILFLVAAATRVHSNWVNVISDLKKIEDLIQSMHIDATLYTESDVHPSCKVTAMKCFLLELQVISLESGDASIHDTVENLIILANNSLSSNGNVTESGCKECEELEEKNIKEFLQSFVHIVQMFINTSSGGGSGGGGSGGGGSGGGGSGGGSLQITCPPPMSVEHADIWVKSYSLYSRERYICNSGFKRKAGTSSLTECVLNKATNVAHWTTPSLKCIRDPALVHQRPAPPSTVTTAGVTPQPESLSPSGKEPAASSPSSNNTAATTAAIVPGSQLMPSKSPSTGTTEISSHESSHGTPSQTTAKNWELTASASHQPPGVYPQGHSDTTVAISTSTVLLCGLSAVSLLACYLKSRQTPPLASVEMEAMEALPVTWGTSSRDEDLENCSHHL

SEQ ID NO: 818 - DNA, 4031 bp, Artificial Sequence
  Description of Artificial Sequence: Synthetic polynucleotide
atggcactgcctgtgaccgccctgctgctgccactggccctgctgctgcacgcagccaggcccgacatccagatgacacagaccacaagctccctgtccgcctctctgggcgacagagtgaccatcagctgccgggcctcccaggatatctctaagtatctgaactggtaccagcagaagcccgatggcacagtgaagctgctgatctatcacaccagccgcctgcactccggagtgccttctaggttcagcggctccggctctggcacagactacagcctgaccatctccaacctggagcaggaggatatcgccacctatttctgccagcagggcaatacactgccttacacctttggcggcggcacaaagctggagatcaccggaggaggaggcagcggaggaggaggctccggcggcggcggctctgaggtgaagctgcaggagtccggaccaggcctggtggcacctagccagtccctgtctgtgacatgtaccgtgtccggcgtgtctctgccagactacggcgtgtcttggatcaggcagccacctaggaagggcctggagtggctgggcgtgatctggggcagcgagacaacatactataattctgccctgaagagcagactgacaatcatcaaggacaacagcaagtcccaggtgttcctgaagatgaatagcctgcagacagacgataccgccatctactattgcgccaagcactactattacggcggcagctatgccatggattactggggccagggcacatccgtgaccgtgtctagcaccacaaccccagcacctcgcccaccaacaccagcaccaaccatcgcatcccagccactgtctctgaggcccgaggcatgtaggcctgcagcaggaggcgccgtgcacaccaggggcctggactttgcctgcgatatctatatctgggcaccactggcaggaacatgtggcgtgctgctgctgtccctggtcatcaccctgtattgcaagagaggccggaagaagctgctgtacatcttcaagcagcccttcatgaggcccgtgcagacaacccaggaggaggacggctgcagctgtcggttcccagaggaggaggagggaggatgtgagctgagggtgaagttttctaggagcgccgatgcaccagcatataagcagggacagaaccagctgtacaacgagctgaatctgggcaggagagaggagtacgacgtgctggataagaggaggggaagggaccccgagatgggaggcaagccaaggagaaagaacccccaggagggcctgtataatgagctgcagaaggacaagatggccgaggcctactccgagatcggcatgaagggagagcggcgcaggggcaagggacacgatggcctgtatcagggcctgtctacagccaccaaggacacctacgatgcactgcacatgcaggccctgcctccaaggtgaggatcccgcccctctccctcccccccccctaacgttactggccgaagccgcttggaataaggccggtgtgcgtttgtctatatgttattttccaccatattgccgtcttttggcaatgtgagggcccggaaacctggccctgtcttcttgacgagcattcctaggggtctttcccctctcgccaaaggaatgcaaggtctgttgaatgtcgtgaaggaagcagttcctctggaagcttcttgaagacaaacaacgtctgtagcgaccctttgcaggcagcggaaccccccacctggcgacaggtgcctctgcggccaaaagccacgtgtataagatacacctgcaaaggcggcacaaccccagtgccacgttgtgagttggatagttgtggaaagagtcaaatggctctcctcaagcgtattcaacaaggggctgaaggatgcccagaaggtaccccattgtatgggatctgatctggggcctcggtgcacatgctttacatgtgtttagtcgaggttaaaaaaacgtctaggccccccgaaccacggggacgtggttttcctttgaaaaacacgatgataagcttgccacaacccacaaggagacgaccttccatgtgccaccagcagctggtcatcagctggttctccctggtgtttctggcatccccactggtggcaatctgggagctgaagaaggacgtgtacgtggtggagctggactggtatcccgatgcccctggcgagatggtggtgctgacctgcgacacacctgaggaggatggcatcacctggacactggatcagagctccgaggtgctgggaagcggcaagaccctgacaatccaggtgaaggagttcggcgacgccggccagtacacatgtcacaagggcggcgaggtgctgtctcacagcctgctgctgctgcacaagaaggaggacggcatttggtccacagacatcctgaaggatcagaaggagccaaagaacaagaccttcctgcggtgcgaggccaagaattatagcggccggttcacctgttggtggctgaccacaatcagcaccgatctgacattttccgtgaagtctagccggggctcctctgacccacagggagtgacatgcggagcagccaccctgtccgccgagcgggtgagaggcgataacaaggagtacgagtattccgtggagtgccaggaggactctgcctgtcctgcagcagaggagagcctgccaatcgaagtgatggtggatgccgtgcacaagctgaagtacgagaattatacaagctccttctttatcagggacatcatcaagcctgatccccctaagaacctgcagctgaagccactgaagaattctcgccaggtggaggtgagctgggagtacccagacacctggtccacaccccactcttatttcagcctgaccttttgcgtgcaggtgcagggcaagtccaagcgggagaagaaggacagagtgttcaccgataagacatctgccaccgtgatctgtcggaagaacgcctccatctctgtgagggcccaggatcgctactattctagctcctggagcgagtgggcatccgtgccatgttctggaggaggaggaagcggaggaggaggatccggcggaggaggctctagaaatctgccagtggcaacccctgacccaggaatgttcccttgcctgcaccacagccagaacctgctgagggccgtgtccaatatgctgcagaaggcccgccagacactggagttttacccttgtaccagcgaggagatcgaccacgaggatatcacaaaggataagacctccacagtggaggcctgcctgccactggagctgaccaagaacgagagctgtctgaattcccgggagacatctttcatcaccaacggcagctgcctggcctccagaaagacatcttttatgatggccctgtgcctgtctagcatctacgaggacctgaagatgtatcaggtggagttcaagaccatgaacgccaagctgctgatggaccctaagaggcagatctttctggatcagaatatgctggccgtgatcgacgagctgatgcaggccctgaacttcaatagcgagacagtgccacagaagtcctctctggaggagcccgatttctacaagaccaagatcaagctgtgcatcctgctgcacgcctttaggatccgcgccgtgaccatcgaccgcgtgatgtcttatctgaacgcatccggaggatctggaggagtgcaggtggagacaatcagccccggcgatggcaggacctttcctaagcgcggccagacatgcgtggtgcactacaccggcatgctgggcgacggcaagaaggtggacagctcccgggatagaaataagcccttcaagtttatgctgggcaagcaggaagtgatcagaggctgggaggagggagtggcacagatgtctgtgggacagggcgccaagctgacaatcagcccagattacgcatatggagcaaccggacacccaggaatcatcccaccccacgccaccctggtgttcgacgtggagctgctggagctggagtga

SEQ ID NO: 819 - DNA, 3698 bp, Artificial Sequence
  Description of Artificial Sequence: Synthetic polynucleotide
atggcactgcctgtgaccgccctgctgctgccactggccctgctgctgcacgcagccaggcccgacatccagatgacacagaccacaagctccctgtccgcctctctgggcgacagagtgaccatcagctgccgggcctcccaggatatctctaagtatctgaactggtaccagcagaagcccgatggcacagtgaagctgctgatctatcacaccagccgcctgcactccggagtgccttctaggttcagcggctccggctctggcacagactacagcctgaccatctccaacctggagcaggaggatatcgccacctatttctgccagcagggcaatacactgccttacacctttggcggcggcacaaagctggagatcaccggaggaggaggcagcggaggaggaggctccggcggcggcggctctgaggtgaagctgcaggagtccggaccaggcctggtggcacctagccagtccctgtctgtgacatgtaccgtgtccggcgtgtctctgccagactacggcgtgtcttggatcaggcagccacctaggaagggcctggagtggctgggcgtgatctggggcagcgagacaacatactataattctgccctgaagagcagactgacaatcatcaaggacaacagcaagtcccaggtgttcctgaagatgaatagcctgcagacagacgataccgccatctactattgcgccaagcactactattacggcggcagctatgccatggattactggggccagggcacatccgtgaccgtgtctagcaccacaaccccagcacctcgcccaccaacaccagcaccaaccatcgcatcccagccactgtctctgaggcccgaggcatgtaggcctgcagcaggaggcgccgtgcacaccaggggcctggactttgcctgcgatatctatatctgggcaccactggcaggaacatgtggcgtgctgctgctgtccctggtcatcaccctgtattgcaagagaggccggaagaagctgctgtacatcttcaagcagcccttcatgaggcccgtgcagacaacccaggaggaggacggctgcagctgtcggttcccagaggaggaggagggaggatgtgagctgagggtgaagttttctaggagcgccgatgcaccagcatataagcagggacagaaccagctgtacaacgagctgaatctgggcaggagagaggagtacgacgtgctggataagaggaggggaagggaccccgagatgggaggcaagccaaggagaaagaacccccaggagggcctgtataatgagctgcagaaggacaagatggccgaggcctactccgagatcggcatgaagggagagcggcgcaggggcaagggacacgatggcctgtatcagggcctgtctacagccaccaaggacacctacgatgcactgcacatgcaggccctgcctccaaggtgaggatcccgcccctctccctcccccccccctaacgttactggccgaagccgcttggaataaggccggtgtgcgtttgtctatatgttattttccaccatattgccgtcttttggcaatgtgagggcccggaaacctggccctgtcttcttgacgagcattcctaggggtctttcccctctcgccaaaggaatgcaaggtctgttgaatgtcgtgaaggaagcagttcctctggaagcttcttgaagacaaacaacgtctgtagcgaccctttgcaggcagcggaaccccccacctggcgacaggtgcctctgcggccaaaagccacgtgtataagatacacctgcaaaggcggcacaaccccagtgccacgttgtgagttggatagttgtggaaagagtcaaatggctctcctcaagcgtattcaacaaggggctgaaggatgcccagaaggtaccccattgtatgggatctgatctggggcctcggtgcacatgctttacatgtgtttagtcgaggttaaaaaaacgtctaggccccccgaaccacggggacgtggttttcctttgaaaaacacgatgataagcttgccacaacccacaaggagacgaccttccatgtgccaccaacagctcgtgatcagctggttctccctggtgttcctggctagccccctggtggccatctgggagctcaagaaagacgtgtacgtggtggaactggactggtaccccgacgcccctggcgaaatggtggtgctgacatgcgacacccctgaggaggatggcattacctggaccctcgatcagagctccgaggtgctgggcagcggcaaaaccctgaccatccaggtgaaggagtttggcgatgccggccagtacacatgtcacaagggcggcgaggtgctgagccactccctgctgctgctccacaagaaggaagatggcatctggagcaccgacattctgaaggatcagaaggagcccaagaacaagacattcctgaggtgtgaggccaagaactacagcggcaggtttacctgctggtggctgacaacaatcagcaccgacctcacattctccgtcaagtcctccaggggttcttccgaccctcaaggcgtgacatgcggcgctgccaccctgagcgctgagagagtcaggggcgacaacaaggagtacgagtacagcgtcgaatgtcaggaggacagcgcctgtcccgccgctgaagagagcctgcctatcgaggtgatggtggacgccgtgcacaaactgaagtatgagaattacacctccagcttcttcatcagggacatcatcaaacccgatccccccaagaacctgcagctgaagcctctgaagaacagcagacaggtcgaagtgtcctgggagtaccctgatacctggtccacaccccacagctacttcagcctgaccttttgcgtgcaggtgcagggcaagagcaaaagggagaagaaggacagggtgtttaccgacaagacctccgccacagtgatttgcagaaagaacgcctccatcagcgtgagggcccaggacaggtattacagcagctcctggagcgaatgggctagcgtgccctgtagcggaggaggaggcagcggaggaggaggttctggaggaggcggcagcagaaacctgcctgtcgctacccccgaccccggaatgttcccctgcctgcaccactcccagaacctcctgagggccgtgtccaacatgctgcagaaggctagacagaccctcgaattctacccctgtaccagcgaggagatcgaccatgaggacatcaccaaggataagaccagcaccgtggaggcttgcctgcctctggagctgaccaaaaacgagagctgcctgaacagcagggaaaccagcttcattaccaacggctcctgcctggcctccaggaagacatccttcatgatggccctgtgcctcagcagcatctacgaggacctgaagatgtatcaggtggagtttaagaccatgaatgccaagctgctgatggaccctaagaggcagatcttcctggaccagaatatgctggccgtgattgacgagctgatgcaggccctcaactttaacagcgagaccgtgccccagaaaagcagcctcgaagagcctgacttctacaaaaccaagattaagctgtgtatcctgctgcacgccttcaggatcagggccgtgaccatcgacagggtgatgagctacctgaacgccagctaa

SEQ ID NO: 820 - DNA, 1461 bp, Artificial Sequence; identical to SEQ ID NO: 541
  Description of Artificial Sequence: Synthetic polynucleotide

SEQ ID NO: 821 - DNA, 2034 bp, Artificial Sequence; identical to SEQ ID NO: 548
  Description of Artificial Sequence: Synthetic polynucleotide

SEQ ID NO: 822 - DNA, 1467 bp, Artificial Sequence
  Description of Artificial Sequence: Synthetic polynucleotide
atggcactgcctgtgaccgccctgctgctgccactggccctgctgctgcacgcagccaggcccgacatccagatgacacagaccacaagctccctgtccgcctctctgggcgacagagtgaccatcagctgccgggcctcccaggatatctctaagtatctgaactggtaccagcagaagcccgatggcacagtgaagctgctgatctatcacaccagccgcctgcactccggagtgccttctaggttcagcggctccggctctggcacagactacagcctgaccatctccaacctggagcaggaggatatcgccacctatttctgccagcagggcaatacactgccttacacctttggcggcggcacaaagctggagatcaccggaggaggaggcagcggaggaggaggctccggcggcggcggctctgaggtgaagctgcaggagtccggaccaggcctggtggcacctagccagtccctgtctgtgacatgtaccgtgtccggcgtgtctctgccagactacggcgtgtcttggatcaggcagccacctaggaagggcctggagtggctgggcgtgatctggggcagcgagacaacatactataattctgccctgaagagcagactgacaatcatcaaggacaacagcaagtcccaggtgttcctgaagatgaatagcctgcagacagacgataccgccatctactattgcgccaagcactactattacggcggcagctatgccatggattactggggccagggcacatccgtgaccgtgtctagcaccacaaccccagcacctcgcccaccaacaccagcaccaaccatcgcatcccagccactgtctctgaggcccgaggcatgtaggcctgcagcaggaggcgccgtgcacaccaggggcctggactttgcctgcgatatctatatctgggcaccactggcaggaacatgtggcgtgctgctgctgtccctggtcatcaccctgtattgcaagagaggccggaagaagctgctgtacatcttcaagcagcccttcatgaggcccgtgcagacaacccaggaggaggacggctgcagctgtcggttcccagaggaggaggagggaggatgtgagctgagggtgaagttttctaggagcgccgatgcaccagcatataagcagggacagaaccagctgtacaacgagctgaatctgggcaggagagaggagtacgacgtgctggataagaggaggggaagggaccccgagatgggaggcaagccaaggagaaagaacccccaggagggcctgtataatgagctgcagaaggacaagatggccgaggcctactccgagatcggcatgaagggagagcggcgcaggggcaagggacacgatggcctgtatcagggcctgtctacagccaccaaggacacctacgatgcactgcacatgcaggccctgcctccaaggggatcctga

SEQ ID NO: 823 - protein, 9 aa, Artificial Sequence
  Description of Artificial Sequence: Synthetic HA Tag
YPYDVPDYA

SEQ ID NO: 824 - DNA, 27 bp, Artificial Sequence
  Description of Artificial Sequence: Synthetic HA Tag
tacccatacgatgttccagattacgct

SEQ ID NO: 825 - DNA, 27 bp, Artificial Sequence
  Description of Artificial Sequence: Synthetic HA Tag
tatccttacgatgtgcccgactatgct

SEQ ID NO: 826 - DNA, 27 bp, Artificial Sequence
  Description of Artificial Sequence: Synthetic HA Tag
tatccgtacgacgtaccagactacgca

SEQ ID NO: 827 - DNA, 321 bp, Artificial Sequence
  Description of Artificial Sequence: Synthetic Destabilizing Domain (DD)
ggagtgcaggtggaaaccatctccccaggagacgggcgcaccttccccaagcgcggccagacctgcgtggtgcactacaccgggatgcttggagatggaaagaaagttgactcctcccgggacagaaacaagccctttaagtttatgctaggcaagcaggaggtgatccgaggctgggaagaaggggttgcccagatgagtgtgggtcagggagccaaactgactatatctccagattatgcctatggtgccactgggcacccaggcatcatcccaccacatgccactctcgtcttcgatgtggagcttctagaactggaa

SEQ ID NO: 828 - protein, 235 aa, Artificial Sequence
  Description of Artificial Sequence: Synthetic polypeptide
LSKGEEDNMAIIKEFMRFKVHMEGSVNGHEFEIEGEGEGRPYEGTQTAKLKVTKGGPLPFAWDILSPQFMYGSKAYVKHPADIPDYLKLSFPEGFKWERVMNFEDGGVVTVTQDSSLQDGEFIYKVKLRGTNFPSDGPVMQKKTMGWEASSERMYPEDGALKGEIKQRLKLKDGGHYDAEVKTTYKAKKPVQLPGAYNVNIKLDITSHNEDYTIVEQYERAEGRHSTGGMDELYK

SEQ ID NO: 829 - DNA, 705 bp, Artificial Sequence
  Description of Artificial Sequence: Synthetic polynucleotide
ttgagcaagggcgaggaggacaacatggccatcatcaaggagttcatgcgcttcaaggtgcacatggagggctccgtgaacggccacgagttcgagatcgagggcgagggcgagggccgcccctacgagggcacccagaccgccaagctgaaggtgaccaagggcggccccctgcccttcgcctgggacatcctgtcccctcagttcatgtacggctccaaggcctacgtgaagcaccccgccgacatccccgactacttgaagctgtccttccccgagggcttcaagtgggagcgcgtgatgaacttcgaggacggcggcgtggtgaccgtgacccaggactcctccctgcaggacggcgagttcatctacaaggtgaagctgcgcggcaccaacttcccctccgacggccccgtaatgcagaagaagaccatgggctgggaggcctcctccgagcggatgtaccccgaggacggcgccctgaagggcgagatcaagcagaggctgaagctgaaggacggcggccactacgacgccgaggtcaagaccacctacaaggccaagaagcccgtgcagctgcccggcgcctacaacgtcaacatcaagctggacatcacctcccacaacgaggactacaccatcgtggaacagtacgagcgcgccgagggccgccactccaccggcggcatggacgagctgtacaag

SEQ ID NO: 830 - protein, 22 aa, Artificial Sequence
  Description of Artificial Sequence: Synthetic peptide
MLLLVTSLLLCELPHPAFLLIP

SEQ ID NO: 831 - DNA, 66 bp, Artificial Sequence
  Description of Artificial Sequence: Synthetic oligonucleotide
atgcttctcctggtgacaagccttctgctctgtgagttaccacacccagcattcctcctgatccca

SEQ ID NO: 832 - DNA, 1527 bp, Artificial Sequence
  Description of Artificial Sequence: Synthetic polynucleotide
atggcactgcctgtgaccgccctgctgctgccactggccctgctgctgcacgcagccaggcccgacatccagatgacacagaccacaagctccctgtccgcctctctgggcgacagagtgaccatcagctgccgggcctcccaggatatctctaagtatctgaactggtaccagcagaagcccgatggcacagtgaagctgctgatctatcacaccagccgcctgcactccggagtgccttctaggttcagcggctccggctctggcacagactacagcctgaccatctccaacctggagcaggaggatatcgccacctatttctgccagcagggcaatacactgccttacacctttggcggcggcacaaagctggagatcaccggaggaggaggcagcggaggaggaggctccggcggcggcggctctgaggtgaagctgcaggagtccggaccaggcctggtggcacctagccagtccctgtctgtgacatgtaccgtgtccggcgtgtctctgccagactacggcgtgtcttggatcaggcagccacctaggaagggcctggagtggctgggcgtgatctggggcagcgagacaacatactataattctgccctgaagagcagactgacaatcatcaaggacaacagcaagtcccaggtgttcctgaagatgaatagcctgcagacagacgataccgccatctactattgcgccaagcactactattacggcggcagctatgccatggattactggggccagggcacatccgtgaccgtgtctagcaccacaaccccagcacctcgcccaccaacaccagcaccaaccatcgcatcccagccactgtctctgaggcccgaggcatgtaggcctgcagcaggaggcgccgtgcacaccaggggcctggactttgcctgcgatatctatatctgggcaccactggcaggaacatgtggcgtgctgctgctgtccctggtcatcaccctgtattgcaagagaggccggaagaagctgctgtacatcttcaagcagcccttcatgaggcccgtgcagacaacccaggaggaggacggctgcagctgtcggttcccagaggaggaggagggaggatgtgagctgagggtgaagttttctaggagcgccgatgcaccagcatataagcagggacagaaccagctgtacaacgagctgaatctgggcaggagagaggagtacgacgtgctggataagaggaggggaagggaccccgagatgggaggcaagccaaggagaaagaacccccaggagggcctgtataatgagctgcagaaggacaagatggccgaggcctactccgagatcggcatgaagggagagcggcgcaggggcaagggacacgatggcctgtatcagggcctgtctacagccaccaaggacacctacgatgcactgcacatgcaggccctgcctccaaggggagctactaacttcagcctgctgaagcaggctggagacgtggaggagaaccctggacctggatcctga

SEQ ID NO: 833 - DNA, 1494 bp, Artificial Sequence
  Description of Artificial Sequence: Synthetic polynucleotide
atggcactgcctgtgaccgccctgctgctgccactggccctgctgctgcacgcagccaggccctatccttacgatgtgcccgactatgctgacatccagatgacacagaccacaagctccctgtccgcctctctgggcgacagagtgaccatcagctgccgggcctcccaggatatctctaagtatctgaactggtaccagcagaagcccgatggcacagtgaagctgctgatctatcacaccagccgcctgcactccggagtgccttctaggttcagcggctccggctctggcacagactacagcctgaccatctccaacctggagcaggaggatatcgccacctatttctgccagcagggcaatacactgccttacacctttggcggcggcacaaagctggagatcaccggaggaggaggcagcggaggaggaggctccggcggcggcggctctgaggtgaagctgcaggagtccggaccaggcctggtggcacctagccagtccctgtctgtgacatgtaccgtgtccggcgtgtctctgccagactacggcgtgtcttggatcaggcagccacctaggaagggcctggagtggctgggcgtgatctggggcagcgagacaacatactataattctgccctgaagagcagactgacaatcatcaaggacaacagcaagtcccaggtgttcctgaagatgaatagcctgcagacagacgataccgccatctactattgcgccaagcactactattacggcggcagctatgccatggattactggggccagggcacatccgtgaccgtgtctagcaccacaaccccagcacctcgcccaccaacaccagcaccaaccatcgcatcccagccactgtctctgaggcccgaggcatgtaggcctgcagcaggaggcgccgtgcacaccaggggcctggactttgcctgcgatatctatatctgggcaccactggcaggaacatgtggcgtgctgctgctgtccctggtcatcaccctgtattgcaagagaggccggaagaagctgctgtacatcttcaagcagcccttcatgaggcccgtgcagacaacccaggaggaggacggctgcagctgtcggttcccagaggaggaggagggaggatgtgagctgagggtgaagttttctaggagcgccgatgcaccagcatataagcagggacagaaccagctgtacaacgagctgaatctgggcaggagagaggagtacgacgtgctggataagaggaggggaagggaccccgagatgggaggcaagccaaggagaaagaacccccaggagggcctgtataatgagctgcagaaggacaagatggccgaggcctactccgagatcggcatgaagggagagcggcgcaggggcaagggacacgatggcctgtatcagggcctgtctacagccaccaaggacacctacgatgcactgcacatgcaggccctgcctccaaggggatcctga

SEQ ID NO: 834 - DNA, 1509 bp, Artificial Sequence
  Description of Artificial Sequence: Synthetic polynucleotide
atggcactgcctgtgaccgccctgctgctgccactggccctgctgctgcacgcagccaggcccgacatccagatgacacagaccacaagctccctgtccgcctctctgggcgacagagtgaccatcagctgccgggcctcccaggatatctctaagtatctgaactggtaccagcagaagcccgatggcacagtgaagctgctgatctatcacaccagccgcctgcactccggagtgccttctaggttcagcggctccggctctggcacagactacagcctgaccatctccaacctggagcaggaggatatcgccacctatttctgccagcagggcaatacactgccttacacctttggcggcggcacaaagctggagatcaccggaggaggaggcagcggaggaggaggctccggcggcggcggctctgaggtgaagctgcaggagtccggaccaggcctggtggcacctagccagtccctgtctgtgacatgtaccgtgtccggcgtgtctctgccagactacggcgtgtcttggatcaggcagccacctaggaagggcctggagtggctgggcgtgatctggggcagcgagacaacatactataattctgccctgaagagcagactgacaatcatcaaggacaacagcaagtcccaggtgttcctgaagatgaatagcctgcagacagacgataccgccatctactattgcgccaagcactactattacggcggcagctatgccatggattactggggccagggcacatccgtgaccgtgtctagcaccacaaccccagcacctcgcccaccaacaccagcaccaaccatcgcatcccagccactgtctctgaggcccgaggcatgtaggcctgcagcaggaggcgccgtgcacaccaggggcctggactttgcctgcgatatctatatctgggcaccactggcaggaacatgtggcgtgctgctgctgtccctggtcatcaccctgtattgcaagagaggccggaagaagctgctgtacatcttcaagcagcccttcatgaggcccgtgcagacaacccaggaggaggacggctgcagctgtcggttcccagaggaggaggagggaggatgtgagctgagggtgaagttttctaggagcgccgatgcaccagcatataagcagggacagaaccagctgtacaacgagctgaatctgggcaggagagaggagtacgacgtgctggataagaggaggggaagggaccccgagatgggaggcaagccaaggagaaagaacccccaggagggcctgtataatgagctgcagaaggacaagatggccgaggcctactccgagatcggcatgaagggagagcggcgcaggggcaagggacacgatggcctgtatcagggcctgtctacagccaccaaggacacctacgatgcactgcacatgcaggccctgcctccaaggagtggtgagtccaggagagtgcggcgcaacaagaggagcaagggatcctga

SEQ ID NO: 835 - DNA, 1461 bp, Artificial Sequence
  Description of Artificial Sequence: Synthetic polynucleotide
atggccttaccagtgaccgccttgctcctgccgctggccttgctgctccacgccgccaggccggacatccagatgacacagactacatcctccctgtctgcctctctgggagacagagtcaccatcagttgcagggcaagtcaggacattagtaaatatttaaattggtatcagcagaaaccagatggaactgttaaactcctgatctaccatacatcaagattacactcaggagtcccatcaaggttcagtggcagtgggtctggaacagattattctctcaccattagcaacctggagcaagaagatattgccacttacttttgccaacagggtaatacgcttccgtacacgttcggaggggggaccaagctggagatcacaggtggcggtggctcgggcggtggtgggtcgggtggcggcggatctgaggtgaaactgcaggagtcaggacctggcctggtggcgccctcacagagcctgtccgtcacatgcactgtctcaggggtctcattacccgactatggtgtaagctggattcgccagcctccacgaaagggtctggagtggctgggagtaatatggggtagtgaaaccacatactataattcagctctcaaatccagactgaccatcatcaaggacaactccaagagccaagttttcttaaaaatgaacagtctgcaaactgatgacacagccatttactactgtgccaaacattattactacggtggtagctatgctatggactactggggccaaggaacctcagtcaccgtctcctcaaccacgacgccagcgccgcgaccaccaacaccggcgcccaccatcgcgtcgcagcccctgtccctgcgcccagaggcgtgccggccagcggcggggggcgcagtgcacacgagggggctggacttcgcctgtgatatctacatctgggcgcccttggccgggacttgtggggtccttctcctgtcactggttatcaccctttactgcaaacggggcagaaagaaactcctgtatatattcaaacaaccatttatgagaccagtacaaactactcaagaggaagatggctgtagctgccgatttccagaagaagaagaaggaggatgtgaactgagagtgaagttcagcaggagcgcagacgcccccgcgtacaagcagggccagaaccagctctataacgagctcaatctaggacgaagagaggagtacgatgttttggacaagagacgtggccgggaccctgagatggggggaaagccgagaaggaagaaccctcaggaaggcctgtacaatgaactgcagaaagataagatggcggaggcctacagtgagattgggatgaaaggcgagcgccggaggggcaaggggcacgatggcctttaccagggtctcagtacagccaccaaggacacctacgacgcccttcacatgcaggccctgccccctcgctaa

SEQ ID NO: 836 - skipped

SEQ ID NO: 837 - DNA, 1461 bp, Artificial Sequence; identical to SEQ ID NO: 541
  Description of Artificial Sequence: Synthetic polynucleotide

SEQ ID NO: 838 - DNA, 2232 bp, Artificial Sequence
  Description of Artificial Sequence: Synthetic polynucleotide
atggccttaccagtgaccgccttgctcctgccgctggccttgctgctccacgccgccaggccggacatccagatgacacagactacatcctccctgtctgcctctctgggagacagagtcaccatcagttgcagggcaagtcaggacattagtaaatatttaaattggtatcagcagaaaccagatggaactgttaaactcctgatctaccatacatcaagattacactcaggagtcccatcaaggttcagtggcagtgggtctggaacagattattctctcaccattagcaacctggagcaagaagatattgccacttacttttgccaacagggtaatacgcttccgtacacgttcggaggggggaccaagctggagatcacaggtggcggtggctcgggcggtggtgggtcgggtggcggcggatctgaggtgaaactgcaggagtcaggacctggcctggtggcgccctcacagagcctgtccgtcacatgcactgtctcaggggtctcattacccgactatggtgtaagctggattcgccagcctccacgaaagggtctggagtggctgggagtaatatggggtagtgaaaccacatactataattcagctctcaaatccagactgaccatcatcaaggacaactccaagagccaagttttcttaaaaatgaacagtctgcaaactgatgacacagccatttactactgtgccaaacattattactacggtggtagctatgctatggactactggggccaaggaacctcagtcaccgtctcctcaaccacgacgccagcgccgcgaccaccaacaccggcgcccaccatcgcgtcgcagcccctgtccctgcgcccagaggcgtgccggccagcggcggggggcgcagtgcacacgagggggctggacttcgcctgtgatatctacatctgggcgcccttggccgggacttgtggggtccttctcctgtcactggttatcaccctttactgcaaacggggcagaaagaaactcctgtatatattcaaacaaccatttatgagaccagtacaaactactcaagaggaagatggctgtagctgccgatttccagaagaagaagaaggaggatgtgaactgagagtgaagttcagcaggagcgcagacgcccccgcgtacaagcagggccagaaccagctctataacgagctcaatctaggacgaagagaggagtacgatgttttggacaagagacgtggccgggaccctgagatggggggaaagccgagaaggaagaaccctcaggaaggcctgtacaatgaactgcagaaagataagatggcggaggcctacagtgagattgggatgaaaggcgagcgccggaggggcaaggggcacgatggcctttaccagggtctcagtacagccaccaaggacacctacgacgcccttcacatgcaggccctgccccctcgcggatccggagctactaacttcagcctgctgaagcaggctggagacgtggaggagaaccctggacctttgagcaagggcgaggaggacaacatggccatcatcaaggagttcatgcgcttcaaggtgcacatggagggctccgtgaacggccacgagttcgagatcgagggcgagggcgagggccgcccctacgagggcacccagaccgccaagctgaaggtgaccaagggcggccccctgcccttcgcctgggacatcctgtcccctcagttcatgtacggctccaaggcctacgtgaagcaccccgccgacatccccgactacttgaagctgtccttccccgagggcttcaagtgggagcgcgtgatgaacttcgaggacggcggcgtggtgaccgtgacccaggactcctccctgcaggacggcgagttcatctacaaggtgaagctgcgcggcaccaacttcccctccgacggccccgtaatgcagaagaagaccatgggctgggaggcctcctccgagcggatgtaccccgaggacggcgccctgaagggcgagatcaagcagaggctgaagctgaaggacggcggccactacgacgccgaggtcaagaccacctacaaggccaagaagcccgtgcagctgcccggcgcctacaacgtcaacatcaagctggacatcacctcccacaacgaggactacaccatcgtggaacagtacgagcgcgccgagggccgccactccaccggcggcatggacgagctgtacaagtaa

SEQ ID NO: 839 - DNA, 2658 bp, Artificial Sequence
  Description of Artificial Sequence: Synthetic polynucleotide
atggcactgcctgtgaccgccctgctgctgccactggccctgctgctgcacgcagccaggcccgacatccagatgacacagaccacaagctccctgtccgcctctctgggcgacagagtgaccatcagctgccgggcctcccaggatatctctaagtatctgaactggtaccagcagaagcccgatggcacagtgaagctgctgatctatcacaccagccgcctgcactccggagtgccttctaggttcagcggctccggctctggcacagactacagcctgaccatctccaacctggagcaggaggatatcgccacctatttctgccagcagggcaatacactgccttacacctttggcggcggcacaaagctggagatcaccggaggaggaggcagcggaggaggaggctccggcggcggcggctctgaggtgaagctgcaggagtccggaccaggcctggtggcacctagccagtccctgtctgtgacatgtaccgtgtccggcgtgtctctgccagactacggcgtgtcttggatcaggcagccacctaggaagggcctggagtggctgggcgtgatctggggcagcgagacaacatactataattctgccctgaagagcagactgacaatcatcaaggacaacagcaagtcccaggtgttcctgaagatgaatagcctgcagacagacgataccgccatctactattgcgccaagcactactattacggcggcagctatgccatggattactggggccagggcacatccgtgaccgtgtctagcaccacaaccccagcacctcgcccaccaacaccagcaccaaccatcgcatcccagccactgtctctgaggcccgaggcatgtaggcctgcagcaggaggcgccgtgcacaccaggggcctggactttgcctgcgatatctatatctgggcaccactggcaggaacatgtggcgtgctgctgctgtccctggtcatcaccctgtattgcaagagaggccggaagaagctgctgtacatcttcaagcagcccttcatgaggcccgtgcagacaacccaggaggaggacggctgcagctgtcggttcccagaggaggaggagggaggatgtgagctgagggtgaagttttctaggagcgccgatgcaccagcatataagcagggacagaaccagctgtacaacgagctgaatctgggcaggagagaggagtacgacgtgctggataagaggaggggaagggaccccgagatgggaggcaagccaaggagaaagaacccccaggagggcctgtataatgagctgcagaaggacaagatggccgaggcctactccgagatcggcatgaagggagagcggcgcaggggcaagggacacgatggcctgtatcagggcctgtctacagccaccaaggacacctacgatgcactgcacatgcaggccctgcctccaaggggttcaggagctactaacttcagcctgctgaagcaggctggagacgtggaggagaaccctggacctaactgggtgaacgtgatctccgacctgaaaaagatcgaggatttgatccagagcatgcacattgacgccaccctgtataccgagtccgacgtgcacccgagttgcaaggtgactgccatgaagtgcttcctgctggagctgcaagtgatcagcctggagagcggcgacgccagcatccacgacaccgtggaaaaccttatcattctggccaacaatagcctgagcagcaacggcaacgtgaccgaaagcggatgtaaggaatgcgaggaactggaagagaagaatatcaaagaattcctgcaaagcttcgtgcacatcgtgcagatgttcatcaacacttcttcaggtggcggtagtggtgggggaggatctggaggcggaggaagcgggggtggaggttcaggaggagggagcttgcaaattacctgcccccctccgatgagcgtggagcacgccgacatctgggtcaagagctacagcttgtatagtagggagcggtacatctgtaacagcgggttcaagaggaaggccgggaccagctcactgaccgagtgcgtgttgaacaaggccaccaacgtggcccactggaccacccctagccttaagtgcatcagggacccagcgctcgtacaccagagacccgcgcctccctctacggtaaccacggcaggcgtaaccccccagcccgagagcctgtccccgagcggcaaggagcctgcagcgagcagcccctcaagcaacaacacagccgctaccaccgcggcaatcgtgcccggcagccagctgatgccctcaaagagccccagcaccggcaccactgagataagcagccacgagagctcacacggcactccctcacagaccactgccaagaattgggagctgaccgcctctgccagccaccagcccccaggcgtgtatccccagggccacagcgacaccacggtcgccatcagcacatctacagtgcttttgtgcggccttagcgccgtgtcactgctggcatgctacttgaaaagtaggcaaactccccctcttgccagtgtggaaatggaggccatggaagccctgcccgtgacctggggcaccagttctagggacgaggaccttgagaactgctcacatcatttgtga

SEQ ID NO: 840 - DNA, 2724 bp, Artificial Sequence
  Description of Artificial Sequence: Synthetic polynucleotide
atggcactgcctgtgaccgccctgctgctgccactggccctgctgctgcacgcagccaggcccgacatccagatgacacagaccacaagctccctgtccgcctctctgggcgacagagtgaccatcagctgccgggcctcccaggatatctctaagtatctgaactggtaccagcagaagcccgatggcacagtgaagctgctgatctatcacaccagccgcctgcactccggagtgccttctaggttcagcggctccggctctggcacagactacagcctgaccatctccaacctggagcaggaggatatcgccacctatttctgccagcagggcaatacactgccttacacctttggcggcggcacaaagctggagatcaccggaggaggaggcagcggaggaggaggctccggcggcggcggctctgaggtgaagctgcaggagtccggaccaggcctggtggcacctagccagtccctgtctgtgacatgtaccgtgtccggcgtgtctctgccagactacggcgtgtcttggatcaggcagccacctaggaagggcctggagtggctgggcgtgatctggggcagcgagacaacatactataattctgccctgaagagcagactgacaatcatcaaggacaacagcaagtcccaggtgttcctgaagatgaatagcctgcagacagacgataccgccatctactattgcgccaagcactactattacggcggcagctatgccatggattactggggccagggcacatccgtgaccgtgtctagcaccacaaccccagcacctcgcccaccaacaccagcaccaaccatcgcatcccagccactgtctctgaggcccgaggcatgtaggcctgcagcaggaggcgccgtgcacaccaggggcctggactttgcctgcgatatctatatctgggcaccactggcaggaacatgtggcgtgctgctgctgtccctggtcatcaccctgtattgcaagagaggccggaagaagctgctgtacatcttcaagcagcccttcatgaggcccgtgcagacaacccaggaggaggacggctgcagctgtcggttcccagaggaggaggagggaggatgtgagctgagggtgaagttttctaggagcgccgatgcaccagcatataagcagggacagaaccagctgtacaacgagctgaatctgggcaggagagaggagtacgacgtgctggataagaggaggggaagggaccccgagatgggaggcaagccaaggagaaagaacccccaggagggcctgtataatgagctgcagaaggacaagatggccgaggcctactccgagatcggcatgaagggagagcggcgcaggggcaagggacacgatggcctgtatcagggcctgtctacagccaccaaggacacctacgatgcactgcacatgcaggccctgcctccaaggggttcaggagctactaacttcagcctgctgaagcaggctggagacgtggaggagaaccctggacctatgcttctcctggtgacaagccttctgctctgtgagttaccacacccagcattcctcctgatcccaaactgggtgaacgtgatctccgacctgaaaaagatcgaggatttgatccagagcatgcacattgacgccaccctgtataccgagtccgacgtgcacccgagttgcaaggtgactgccatgaagtgcttcctgctggagctgcaagtgatcagcctggagagcggcgacgccagcatccacgacaccgtggaaaaccttatcattctggccaacaatagcctgagcagcaacggcaacgtgaccgaaagcggatgtaaggaatgcgaggaactggaagagaagaatatcaaagaattcctgcaaagcttcgtgcacatcgtgcagatgttcatcaacacttcttcaggtggcggtagtggtgggggaggatctggaggcggaggaagcgggggtggaggttcaggaggagggagcttgcaaattacctgcccccctccgatgagcgtggagcacgccgacatctgggtcaagagctacagcttgtatagtagggagcggtacatctgtaacagcgggttcaagaggaaggccgggaccagctcactgaccgagtgcgtgttgaacaaggccaccaacgtggcccactggaccacccctagccttaagtgcatcagggacccagcgctcgtacaccagagacccgcgcctccctctacggtaaccacggcaggcgtaaccccccagcccgagagcctgtccccgagcggcaaggagcctgcagcgagcagcccctcaagcaacaacacagccgctaccaccgcggcaatcgtgcccggcagccagctgatgccctcaaagagccccagcaccggcaccactgagataagcagccacgagagctcacacggcactccctcacagaccactgccaagaattgggagctgaccgcctctgccagccaccagcccccaggcgtgtatccccagggccacagcgacaccacggtcgccatcagcacatctacagtgcttttgtgcggccttagcgccgtgtcactgctggcatgctacttgaaaagtaggcaaactccccctcttgccagtgtggaaatggaggccatggaagccctgcccgtgacctggggcaccagttctagggacgaggaccttgagaactgctcacatcatttgtga

SEQ ID NO: 841 - DNA, 2712 bp, Artificial Sequence
  Description of Artificial Sequence: Synthetic polynucleotide
atggcactgcctgtgaccgccctgctgctgccactggccctgctgctgcacgcagccaggcccgacatccagatgacacagaccacaagctccctgtccgcctctctgggcgacagagtgaccatcagctgccgggcctcccaggatatctctaagtatctgaactggtaccagcagaagcccgatggcacagtgaagctgctgatctatcacaccagccgcctgcactccggagtgccttctaggttcagcggctccggctctggcacagactacagcctgaccatctccaacctggagcaggaggatatcgccacctatttctgccagcagggcaatacactgccttacacctttggcggcggcacaaagctggagatcaccggaggaggaggcagcggaggaggaggctccggcggcggcggctctgaggtgaagctgcaggagtccggaccaggcctggtggcacctagccagtccctgtctgtgacatgtaccgtgtccggcgtgtctctgccagactacggcgtgtcttggatcaggcagccacctaggaagggcctggagtggctgggcgtgatctggggcagcgagacaacatactataattctgccctgaagagcagactgacaatcatcaaggacaacagcaagtcccaggtgttcctgaagatgaatagcctgcagacagacgataccgccatctactattgcgccaagcactactattacggcggcagctatgccatggattactggggccagggcacatccgtgaccgtgtctagcaccacaaccccagcacctcgcccaccaacaccagcaccaaccatcgcatcccagccactgtctctgaggcccgaggcatgtaggcctgcagcaggaggcgccgtgcacaccaggggcctggactttgcctgcgatatctatatctgggcaccactggcaggaacatgtggcgtgctgctgctgtccctggtcatcaccctgtattgcaagagaggccggaagaagctgctgtacatcttcaagcagcccttcatgaggcccgtgcagacaacccaggaggaggacggctgcagctgtcggttcccagaggaggaggagggaggatgtgagctgagggtgaagttttctaggagcgccgatgcaccagcatataagcagggacagaaccagctgtacaacgagctgaatctgggcaggagagaggagtacgacgtgctggataagaggaggggaagggaccccgagatgggaggcaagccaaggagaaagaacccccaggagggcctgtataatgagctgcagaaggacaagatggccgaggcctactccgagatcggcatgaagggagagcggcgcaggggcaagggacacgatggcctgtatcagggcctgtctacagccaccaaggacacctacgatgcactgcacatgcaggccctgcctccaaggggatccggagctactaacttcagcctgctgaagcaggctggagacgtggaggagaaccctggacctatggactggacctggattctgtttctggtggccgctgccacaagagtgcacagcaattgggtcaacgtgatcagcgacctgaagaagatcgaggacctgatccagagcatgcacatcgacgccacactgtacaccgagtccgatgtgcaccctagctgcaaagtgaccgccatgaagtgctttctgctggaactgcaagtgatcagcctggaaagcggcgacgccagcatccacgataccgtggaaaatctgatcatcctggccaacaacagcctgagcagcaacggcaatgtgaccgagagcggctgcaaagagtgcgaggaactggaagagaagaacatcaaagagttcctccagagcttcgtccacatcgtgcagatgttcatcaacaccagctctggcggaggaagcggaggcggaggatctggtggtggtggatctggcggcggtggtagtggcggaggttctctgcaaatcacctgtcctccacctatgagcgtggaacacgccgacatctgggtcaagagctacagcctgtacagcagagagcggtacatctgcaacagcggcttcaagagaaaggccggcacaagcagcctgaccgagtgtgtgctgaacaaggccacaaacgtggcccactggaccacacctagcctgaagtgcatcagagatcccgctctggttcaccagaggcctgctcctccatctacagtgacaacagctggcgtgacccctcagcctgagtctctgtctccatctggaaaagagcctgccgccagctctcccagctctaacaatactgctgccaccacagccgccatcgtgcctggatctcagctgatgcctagcaagagccctagcaccggcacaacagagatcagctctcacgagtctagccacggcaccccatctcagaccacagccaagaattgggagctgaccgcctctgcctctcatcagccacctggtgtttaccctcaaggccactctgataccaccgtggccatcagcacaagcacagtgctgctgtgtggactgtctgccgtgtctctgctggcctgctacctgaagtctagacagacacctcctctggccagcgtggaaatggaagccatggaagctctgcctgtgacatggggcaccagcagcagagatgaggacctcgagaattgcagccaccacctgtag

SEQ ID NO: 842 - protein, 728 aa, Artificial Sequence
  Description of Artificial Sequence: Synthetic Construct
MCHQQLVISWFSLVFLASPLVAIWELKKDVYVVELDWYPDAPGEMVVLTCDTPEEDGITWTLDQSSEVLGSGKTLTIQVKEFGDAGQYTCHKGGEVLSHSLLLLHKKEDGIWSTDILKDQKEPKNKTFLRCEAKNYSGRFTCWWLTTISTDLTFSVKSSRGSSDPQGVTCGAATLSAERVRGDNKEYEYSVECQEDSACPAAEESLPIEVMVDAVHKLKYENYTSSFFIRDIIKPDPPKNLQLKPLKNSRQVEVSWEYPDTWSTPHSYFSLTFCVQVQGKSKREKKDRVFTDKTSATVICRKNASISVRAQDRYYSSSWSEWASVPCSGGGGSGGGGSGGGGSRNLPVATPDPGMFPCLHHSQNLLRAVSNMLQKARQTLEFYPCTSEEIDHEDITKDKTSTVEACLPLELTKNESCLNSRETSFITNGSCLASRKTSFMMALCLSSIYEDLKMYQVEFKTMNAKLLMDPKRQIFLDQNMLAVIDELMQALNFNSETVPQKSSLEEPDFYKTKIKLCILLHAFRIRAVTIDRVMSYLNASGSVGSLNCIVAVSQNMGVGKNGDLPWPPLRNEFRYFQRMTTTSSVEGKQNLVIMGKKTWFSIPEKNRPLKGRINLVLSRELKEPPQGAHFLSRSLDDALKLTEQPELANKVDMVWIVGGSSVYKEAMNHPGHLKLFVTRIMQDFESDTFFPEIDLEKYKLLPEYPGVLSDVQEEKGIKYKFEVYEKND

SEQ ID NO: 843 - protein, 741 aa, Artificial Sequence
  Description of Artificial Sequence: Synthetic Construct
MCHQQLVISWFSLVFLASPLVAIWELKKDVYVVELDWYPDAPGEMVVLTCDTPEEDGITWTLDQSSEVLGSGKTLTIQVKEFGDAGQYTCHKGGEVLSHSLLLLHKKEDGIWSTDILKDQKEPKNKTFLRCEAKNYSGRFTCWWLTTISTDLTFSVKSSRGSSDPQGVTCGAATLSAERVRGDNKEYEYSVECQEDSACPAAEESLPIEVMVDAVHKLKYENYTSSFFIRDIIKPDPPKNLQLKPLKNSRQVEVSWEYPDTWSTPHSYFSLTFCVQVQGKSKREKKDRVFTDKTSATVICRKNASISVRAQDRYYSSSWSEWASVPCSGGGGSGGGGSGGGGSRNLPVATPDPGMFPCLHHSQNLLRAVSNMLQKARQTLEFYPCTSEEIDHEDITKDKTSTVEACLPLELTKNESCLNSRETSFITNGSCLASRKTSFMMALCLSSIYEDLKMYQVEFKTMNAKLLMDPKRQIFLDQNMLAVIDELMQALNFNSETVPQKSSLEEPDFYKTKIKLCILLHAFRIRAVTIDRVMSYLNASGESRRVRRNKRSKGSVGSLNCIVAVSQNMGVGKNGDLPWPPLRNEFRYFQRMTTTSSVEGKQNLVIMGKKTWFSIPEKNRPLKGRINLVLSRELKEPPQGAHFLSRSLDDALKLTEQPELANKVDMVWIVGGSSVYKEAMNHPGHLKLFVTRIMQDFESDTFFPEIDLEKYKLLPEYPGVLSDVQEEKGIKYKFEVYEKND

SEQ ID NO: 844 - protein, 728 aa, Artificial Sequence
  Description of Artificial Sequence: Synthetic Construct
MCHQQLVISWFSLVFLASPLVAIWELKKDVYVVELDWYPDAPGEMVVLTCDTPEEDGITWTLDQSSEVLGSGKTLTIQVKEFGDAGQYTCHKGGEVLSHSLLLLHKKEDGIWSTDILKDQKEPKNKTFLRCEAKNYSGRFTCWWLTTISTDLTFSVKSSRGSSDPQGVTCGAATLSAERVRGDNKEYEYSVECQEDSACPAAEESLPIEVMVDAVHKLKYENYTSSFFIRDIIKPDPPKNLQLKPLKNSRQVEVSWEYPDTWSTPHSYFSLTFCVQVQGKSKREKKDRVFTDKTSATVICRKNASISVRAQDRYYSSSWSEWASVPCSGGGGSGGGGSGGGGSRNLPVATPDPGMFPCLHHSQNLLRAVSNMLQKARQTLEFYPCTSEEIDHEDITKDKTSTVEACLPLELTKNESCLNSRETSFITNGSCLASRKTSFMMALCLSSIYEDLKMYQVEFKTMNAKLLMDPKRQIFLDQNMLAVIDELMQALNFNSETVPQKSSLEEPDFYKTKIKLCILLHAFRIRAVTIDRVMSYLNASGSVGSLNCIVAVSQNMGIGKNGDLPWPPLRNEFRYFQRMTTTSSVEGKQNLVIMGKKTWFSIPEKNRPLKGRINLVLSRELKEPPQGAHFLSRSLDDALKLTEQPELANKVDMVWIVGGSSVIKEAMNHPGHLKLFVTRIMQDFESDTFFPEIDLEKYKLLPEYPGVLSDVQEEKGIKYKFEVYEKND

SEQ ID NO: 845 - protein, 741 aa, Artificial Sequence
  Description of Artificial Sequence: Synthetic Construct
MCHQQLVISWFSLVFLASPLVAIWELKKDVYVVELDWYPDAPGEMVVLTCDTPEEDGITWTLDQSSEVLGSGKTLTIQVKEFGDAGQYTCHKGGEVLSHSLLLLHKKEDGIWSTDILKDQKEPKNKTFLRCEAKNYSGRFTCWWLTTISTDLTFSVKSSRGSSDPQGVTCGAATLSAERVRGDNKEYEYSVECQEDSACPAAEESLPIEVMVDAVHKLKYENYTSSFFIRDIIKPDPPKNLQLKPLKNSRQVEVSWEYPDTWSTPHSYFSLTFCVQVQGKSKREKKDRVFTDKTSATVICRKNASISVRAQDRYYSSSWSEWASVPCSGGGGSGGGGSGGGGSRNLPVATPDPGMFPCLHHSQNLLRAVSNMLQKARQTLEFYPCTSEEIDHEDITKDKTSTVEACLPLELTKNESCLNSRETSFITNGSCLASRKTSFMMALCLSSIYEDLKMYQVEFKTMNAKLLMDPKRQIFLDQNMLAVIDELMQALNFNSETVPQKSSLEEPDFYKTKIKLCILLHAFRIRAVTIDRVMSYLNASGESRRVRRNKRSKGSVGSLNCIVAVSQNMGIGKNGDLPWPPLRNEFRYFQRMTTTSSVEGKQNLVIMGKKTWFSIPEKNRPLKGRINLVLSRELKEPPQGAHFLSRSLDDALKLTEQPELANKVDMVWIVGGSSVIKEAMNHPGHLKLFVTRIMQDFESDTFFPEIDLEKYKLLPEYPGVLSDVQEEKGIKYKFEVYEKND

SEQ ID NO: 846 - protein, 542 aa, Artificial Sequence
  Description of Artificial Sequence: Synthetic Construct
MCHQQLVISWFSLVFLASPLVAIWELKKDVYVVELDWYPDAPGEMVVLTCDTPEEDGITWTLDQSSEVLGSGKTLTIQVKEFGDAGQYTCHKGGEVLSHSLLLLHKKEDGIWSTDILKDQKEPKNKTFLRCEAKNYSGRFTCWWLTTISTDLTFSVKSSRGSSDPQGVTCGAATLSAERVRGDNKEYEYSVECQEDSACPAAEESLPIEVMVDAVHKLKYENYTSSFFIRDIIKPDPPKNLQLKPLKNSRQVEVSWEYPDTWSTPHSYFSLTFCVQVQGKSKREKKDRVFTDKTSATVICRKNASISVRAQDRYYSSSWSEWASVPCSGGGGSGGGGSGGGGSRNLPVATPDPGMFPCLHHSQNLLRAVSNMLQKARQTLEFYPCTSEEIDHEDITKDKTSTVEACLPLELTKNESCLNSRETSFITNGSCLASRKTSFMMALCLSSIYEDLKMYQVEFKTMNAKLLMDPKRQIFLDQNMLAVIDELMQALNFNSETVPQKSSLEEPDFYKTKIKLCILLHAFRIRAVTIDRVMSYLNASGS

SEQ ID NO: 847 - DNA, 2187 bp, Artificial Sequence
  Description of Artificial Sequence: Synthetic Construct
atgtgccaccaacagctcgtgatcagctggttctccctggtgttcctggctagccccctggtggccatctgggagctcaagaaagacgtgtacgtggtggaactggactggtaccccgacgcccctggcgaaatggtggtgctgacatgcgacacccctgaggaggatggcattacctggaccctcgatcagagctccgaggtgctgggcagcggcaaaaccctgaccatccaggtgaaggagtttggcgatgccggccagtacacatgtcacaagggcggcgaggtgctgagccactccctgctgctgctccacaagaaggaagatggcatctggagcaccgacattctgaaggatcagaaggagcccaagaacaagacattcctgaggtgtgaggccaagaactacagcggcaggtttacctgctggtggctgacaacaatcagcaccgacctcacattctccgtcaagtcctccaggggttcttccgaccctcaaggcgtgacatgcggcgctgccaccctgagcgctgagagagtcaggggcgacaacaaggagtacgagtacagcgtcgaatgtcaggaggacagcgcctgtcccgccgctgaagagagcctgcctatcgaggtgatggtggacgccgtgcacaaactgaagtatgagaattacacctccagcttcttcatcagggacatcatcaaacccgatccccccaagaacctgcagctgaagcctctgaagaacagcagacaggtcgaagtgtcctgggagtaccctgatacctggtccacaccccacagctacttcagcctgaccttttgcgtgcaggtgcagggcaagagcaaaagggagaagaaggacagggtgtttaccgacaagacctccgccacagtgatttgcagaaagaacgcctccatcagcgtgagggcccaggacaggtattacagcagctcctggagcgaatgggctagcgtgccctgtagcggaggaggaggcagcggaggaggaggttctggaggaggcggcagcagaaacctgcctgtcgctacccccgaccccggaatgttcccctgcctgcaccactcccagaacctcctgagggccgtgtccaacatgctgcagaaggctagacagaccctcgaattctacccctgtaccagcgaggagatcgaccatgaggacatcaccaaggataagaccagcaccgtggaggcttgcctgcctctggagctgaccaaaaacgagagctgcctgaacagcagggaaaccagcttcattaccaacggctcctgcctggcctccaggaagacatccttcatgatggccctgtgcctcagcagcatctacgaggacctgaagatgtatcaggtggagtttaagaccatgaatgccaagctgctgatggaccctaagaggcagatcttcctggaccagaatatgctggccgtgattgacgagctgatgcaggccctcaactttaacagcgagaccgtgccccagaaaagcagcctcgaagagcctgacttctacaaaaccaagattaagctgtgtatcctgctgcacgccttcaggatcagggccgtgaccatcgacagggtgatgagctacctgaacgccagtggatccgttggttcgctaaactgcatcgtcgctgtgtcccagaacatgggcgtcggcaagaacggggacctgccctggccaccgctcaggaatgaattcagatatttccagagaatgaccacaacctcttcagtagaaggtaaacagaatctggtgattatgggtaagaagacctggttctccattcctgagaagaatcgacctttaaagggtagaattaatttagttctcagcagagaactcaaggaacctccacaaggagctcattttctttccagaagtctagatgatgccttaaaacttactgaacaaccagaattagcaaataaagtagacatggtctggatagttggtggcagttctgtttataaggaagccatgaatcacccaggccatcttaaactatttgtgacaaggatcatgcaagactttgaaagtgacacgttttttccagaaattgatttggagaaatataaacttctgccagaatacccaggtgttctctctgatgtccaggaggagaaaggcattaagtacaaatttgaagtatatgagaagaatgattaa

SEQ ID NO: 848 - DNA, 2226 bp, Artificial Sequence
  Description of Artificial Sequence: Synthetic Construct
atgtgccaccaacagctcgtgatcagctggttctccctggtgttcctggctagccccctggtggccatctgggagctcaagaaagacgtgtacgtggtggaactggactggtaccccgacgcccctggcgaaatggtggtgctgacatgcgacacccctgaggaggatggcattacctggaccctcgatcagagctccgaggtgctgggcagcggcaaaaccctgaccatccaggtgaaggagtttggcgatgccggccagtacacatgtcacaagggcggcgaggtgctgagccactccctgctgctgctccacaagaaggaagatggcatctggagcaccgacattctgaaggatcagaaggagcccaagaacaagacattcctgaggtgtgaggccaagaactacagcggcaggtttacctgctggtggctgacaacaatcagcaccgacctcacattctccgtcaagtcctccaggggttcttccgaccctcaaggcgtgacatgcggcgctgccaccctgagcgctgagagagtcaggggcgacaacaaggagtacgagtacagcgtcgaatgtcaggaggacagcgcctgtcccgccgctgaagagagcctgcctatcgaggtgatggtggacgccgtgcacaaactgaagtatgagaattacacctccagcttcttcatcagggacatcatcaaacccgatccccccaagaacctgcagctgaagcctctgaagaacagcagacaggtcgaagtgtcctgggagtaccctgatacctggtccacaccccacagctacttcagcctgaccttttgcgtgcaggtgcagggcaagagcaaaagggagaagaaggacagggtgtttaccgacaagacctccgccacagtgatttgcagaaagaacgcctccatcagcgtgagggcccaggacaggtattacagcagctcctggagcgaatgggctagcgtgccctgtagcggaggaggaggcagcggaggaggaggttctggaggaggcggcagcagaaacctgcctgtcgctacccccgaccccggaatgttcccctgcctgcaccactcccagaacctcctgagggccgtgtccaacatgctgcagaaggctagacagaccctcgaattctacccctgtaccagcgaggagatcgaccatgaggacatcaccaaggataagaccagcaccgtggaggcttgcctgcctctggagctgaccaaaaacgagagctgcctgaacagcagggaaaccagcttcattaccaacggctcctgcctggcctccaggaagacatccttcatgatggccctgtgcctcagcagcatctacgaggacctgaagatgtatcaggtggagtttaagaccatgaatgccaagctgctgatggaccctaagaggcagatcttcctggaccagaatatgctggccgtgattgacgagctgatgcaggccctcaactttaacagcgagaccgtgccccagaaaagcagcctcgaagagcctgacttctacaaaaccaagattaagctgtgtatcctgctgcacgccttcaggatcagggccgtgaccatcgacagggtgatgagctacctgaacgccagtggtgagtccaggagagtgcggcgcaacaagaggagcaagggatccgttggttcgctaaactgcatcgtcgctgtgtcccagaacatgggcgtcggcaagaacggggacctgccctggccaccgctcaggaatgaattcagatatttccagagaatgaccacaacctcttcagtagaaggtaaacagaatctggtgattatgggtaagaagacctggttctccattcctgagaagaatcgacctttaaagggtagaattaatttagttctcagcagagaactcaaggaacctccacaaggagctcattttctttccagaagtctagatgatgccttaaaacttactgaacaaccagaattagcaaataaagtagacatggtctggatagttggtggcagttctgtttataaggaagccatgaatcacccaggccatcttaaactatttgtgacaaggatcatgcaagactttgaaagtgacacgttttttccagaaattgatttggagaaatataaacttctgccagaatacccaggtgttctctctgatgtccaggaggagaaaggcattaagtacaaatttgaagtatatgagaagaatgattaa

SEQ ID NO: 849 - DNA, 2187 bp, Artificial Sequence
  Description of Artificial Sequence: Synthetic Construct
atgtgccaccaacagctcgtgatcagctggttctccctggtgttcctggctagccccctggtggccatctgggagctcaagaaagacgtgtacgtggtggaactggactggtaccccgacgcccctggcgaaatggtggtgctgacatgcgacacccctgaggaggatggcattacctggaccctcgatcagagctccgaggtgctgggcagcggcaaaaccctgaccatccaggtgaaggagtttggcgatgccggccagtacacatgtcacaagggcggcgaggtgctgagccactccctgctgctgctccacaagaaggaagatggcatctggagcaccgacattctgaaggatcagaaggagcccaagaacaagacattcctgaggtgtgaggccaagaactacagcggcaggtttacctgctggtggctgacaacaatcagcaccgacctcacattctccgtcaagtcctccaggggttcttccgaccctcaaggcgtgacatgcggcgctgccaccctgagcgctgagagagtcaggggcgacaacaaggagtacgagtacagcgtcgaatgtcaggaggacagcgcctgtcccgccgctgaagagagcctgcctatcgaggtgatggtggacgccgtgcacaaactgaagtatgagaattacacctccagcttcttcatcagggacatcatcaaacccgatccccccaagaacctgcagctgaagcctctgaagaacagcagacaggtcgaagtgtcctgggagtaccctgatacctggtccacaccccacagctacttcagcctgaccttttgcgtgcaggtgcagggcaagagcaaaagggagaagaaggacagggtgtttaccgacaagacctccgccacagtgatttgcagaaagaacgcctccatcagcgtgagggcccaggacaggtattacagcagctcctggagcgaatgggctagcgtgccctgtagcggaggaggaggcagcggaggaggaggttctggaggaggcggcagcagaaacctgcctgtcgctacccccgaccccggaatgttcccctgcctgcaccactcccagaacctcctgagggccgtgtccaacatgctgcagaaggctagacagaccctcgaattctacccctgtaccagcgaggagatcgaccatgaggacatcaccaaggataagaccagcaccgtggaggcttgcctgcctctggagctgaccaaaaacgagagctgcctgaacagcagggaaaccagcttcattaccaacggctcctgcctggcctccaggaagacatccttcatgatggccctgtgcctcagcagcatctacgaggacctgaagatgtatcaggtggagtttaagaccatgaatgccaagctgctgatggaccctaagaggcagatcttcctggaccagaatatgctggccgtgattgacgagctgatgcaggccctcaactttaacagcgagaccgtgccccagaaaagcagcctcgaagagcctgacttctacaaaaccaagattaagctgtgtatcctgctgcacgccttcaggatcagggccgtgaccatcgacagggtgatgagctacctgaacgccagtggatccgttggttcgctaaactgcatcgtcgctgtgtcccagaacatgggcatcggcaagaacggggacctgccctggccaccgctcaggaatgaattcagatatttccagagaatgaccacaacctcttcagtagaaggtaaacagaatctggtgattatgggtaagaagacctggttctccattcctgagaagaatcgacctttaaagggtagaattaatttagttctcagcagagaactcaaggaacctccacaaggagctcattttctttccagaagtctagatgatgccttaaaacttactgaacaaccagaattagcaaataaagtagacatggtctggatagttggtggcagttctgttattaaggaagccatgaatcacccaggccatcttaaactatttgtgacaaggatcatgcaagactttgaaagtgacacgttttttccagaaattgatttggagaaatataaacttctgccagaatacccaggtgttctctctgatgtccaggaggagaaaggcattaagtacaaatttgaagtatatgagaagaatgattaa

SEQ ID NO: 850 - DNA, 2226 bp, Artificial Sequence
  Description of Artificial Sequence: Synthetic Construct
atgtgccaccaacagctcgtgatcagctggttctccctggtgttcctggctagccccctggtggccatctgggagctcaagaaagacgtgtacgtggtggaactggactggtaccccgacgcccctggcgaaatggtggtgctgacatgcgacacccctgaggaggatggcattacctggaccctcgatcagagctccgaggtgctgggcagcggcaaaaccctgaccatccaggtgaaggagtttggcgatgccggccagtacacatgtcacaagggcggcgaggtgctgagccactccctgctgctgctccacaagaaggaagatggcatctggagcaccgacattctgaaggatcagaaggagcccaagaacaagacattcctgaggtgtgaggccaagaactacagcggcaggtttacctgctggtggctgacaacaatcagcaccgacctcacattctccgtcaagtcctccaggggttcttccgaccctcaaggcgtgacatgcggcgctgccaccctgagcgctgagagagtcaggggcgacaacaaggagtacgagtacagcgtcgaatgtcaggaggacagcgcctgtcccgccgctgaagagagcctgcctatcgaggtgatggtggacgccgtgcacaaactgaagtatgagaattacacctccagcttcttcatcagggacatcatcaaacccgatccccccaagaacctgcagctgaagcctctgaagaacagcagacaggtcgaagtgtcctgggagtaccctgatacctggtccacaccccacagctacttcagcctgaccttttgcgtgcaggtgcagggcaagagcaaaagggagaagaaggacagggtgtttaccgacaagacctccgccacagtgatttgcagaaagaacgcctccatcagcgtgagggcccaggacaggtattacagcagctcctggagcgaatgggctagcgtgccctgtagcggaggaggaggcagcggaggaggaggttctggaggaggcggcagcagaaacctgcctgtcgctacccccgaccccggaatgttcccctgcctgcaccactcccagaacctcctgagggccgtgtccaacatgctgcagaaggctagacagaccctcgaattctacccctgtaccagcgaggagatcgaccatgaggacatcaccaaggataagaccagcaccgtggaggcttgcctgcctctggagctgaccaaaaacgagagctgcctgaacagcagggaaaccagcttcattaccaacggctcctgcctggcctccaggaagacatccttcatgatggccctgtgcctcagcagcatctacgaggacctgaagatgtatcaggtggagtttaagaccatgaatgccaagctgctgatggaccctaagaggcagatcttcctggaccagaatatgctggccgtgattgacgagctgatgcaggccctcaactttaacagcgagaccgtgccccagaaaagcagcctcgaagagcctgacttctacaaaaccaagattaagctgtgtatcctgctgcacgccttcaggatcagggccgtgaccatcgacagggtgatgagctacctgaacgccagtggtgagtccaggagagtgcggcgcaacaagaggagcaagggatccgttggttcgctaaactgcatcgtcgctgtgtcccagaacatgggcatcggcaagaacggggacctgccctggccaccgctcaggaatgaattcagatatttccagagaatgaccacaacctcttcagtagaaggtaaacagaatctggtgattatgggtaagaagacctggttctccattcctgagaagaatcgacctttaaagggtagaattaatttagttctcagcagagaactcaaggaacctccacaaggagctcattttctttccagaagtctagatgatgccttaaaacttactgaacaaccagaattagcaaataaagtagacatggtctggatagttggtggcagttctgttattaaggaagccatgaatcacccaggccatcttaaactatttgtgacaaggatcatgcaagactttgaaagtgacacgttttttccagaaattgatttggagaaatataaacttctgccagaatacccaggtgttctctctgatgtccaggaggagaaaggcattaagtacaaatttgaagtatatgagaagaatgattaa

SEQ ID NO: 851 - DNA, 1629 bp, Artificial Sequence
  Description of Artificial Sequence: Synthetic Construct
atgtgccaccaacagctcgtgatcagctggttctccctggtgttcctggctagccccctggtggccatctgggagctcaagaaagacgtgtacgtggtggaactggactggtaccccgacgcccctggcgaaatggtggtgctgacatgcgacacccctgaggaggatggcattacctggaccctcgatcagagctccgaggtgctgggcagcggcaaaaccctgaccatccaggtgaaggagtttggcgatgccggccagtacacatgtcacaagggcggcgaggtgctgagccactccctgctgctgctccacaagaaggaagatggcatctggagcaccgacattctgaaggatcagaaggagcccaagaacaagacattcctgaggtgtgaggccaagaactacagcggcaggtttacctgctggtggctgacaacaatcagcaccgacctcacattctccgtcaagtcctccaggggttcttccgaccctcaaggcgtgacatgcggcgctgccaccctgagcgctgagagagtcaggggcgacaacaaggagtacgagtacagcgtcgaatgtcaggaggacagcgcctgtcccgccgctgaagagagcctgcctatcgaggtgatggtggacgccgtgcacaaactgaagtatgagaattacacctccagcttcttcatcagggacatcatcaaacccgatccccccaagaacctgcagctgaagcctctgaagaacagcagacaggtcgaagtgtcctgggagtaccctgatacctggtccacaccccacagctacttcagcctgaccttttgcgtgcaggtgcagggcaagagcaaaagggagaagaaggacagggtgtttaccgacaagacctccgccacagtgatttgcagaaagaacgcctccatcagcgtgagggcccaggacaggtattacagcagctcctggagcgaatgggctagcgtgccctgtagcggaggaggaggcagcggaggaggaggttctggaggaggcggcagcagaaacctgcctgtcgctacccccgaccccggaatgttcccctgcctgcaccactcccagaacctcctgagggccgtgtccaacatgctgcagaaggctagacagaccctcgaattctacccctgtaccagcgaggagatcgaccatgaggacatcaccaaggataagaccagcaccgtggaggcttgcctgcctctggagctgaccaaaaacgagagctgcctgaacagcagggaaaccagcttcattaccaacggctcctgcctggcctccaggaagacatccttcatgatggccctgtgcctcagcagcatctacgaggacctgaagatgtatcaggtggagtttaagaccatgaatgccaagctgctgatggaccctaagaggcagatcttcctggaccagaatatgctggccgtgattgacgagctgatgcaggccctcaactttaacagcgagaccgtgccccagaaaagcagcctcgaagagcctgacttctacaaaaccaagattaagctgtgtatcctgctgcacgccttcaggatcagggccgtgaccatcgacagggtgatgagctacctgaacgccagtggatcctaa

SEQ ID NO: 852 - DNA, 2574 bp, Artificial Sequence
  Description of Artificial Sequence: Synthetic Construct
atgtgtcaccagcagttggtcatctcttggttttccctggtttttctggcatctcccctcgtggccatatgggaactgaagaaagatgtttatgtcgtagaattggattggtatccggatgcccctggagaaatggtggtcctcacctgtgacacccctgaagaagatggtatcacctggaccttggaccagagcagtgaggtcttaggctctggcaaaaccctgaccatccaagtcaaagagtttggagatgctggccagtacacctgtcacaaaggaggcgaggttctaagccattcgctcctgctgcttcacaaaaaggaagatggaatttggtccactgatattttaaaggaccagaaagaacccaaaaataagacctttctaagatgcgaggccaagaattattctggacgtttcacctgctggtggctgacgacaatcagtactgatttgacattcagtgtcaaaagcagcagaggctcttctgacccccaaggggtgacgtgcggagctgctacactctctgcagagagagtcagaggggacaacaaggagtatgagtactcagtggagtgccaggaggacagtgcctgcccagctgctgaggagagtctgcccattgaggtcatggtggatgccgttcacaagctcaagtatgaaaactacaccagcagcttcttcatcagggacatcatcaaacctgacccacccaacaacttgcagctgaagccattaaagaattctcggcaggtggaggtcagctgggagtaccctgacacctggagtactccacattcctacttctccctgacattctgcgttcaggtccagggcaagagcaagagagaaaagaaagatagagtcttcaccgacaagacctcagccacggtcatctgccgcaaaaatgccagcattagcgtgcgggcccaggaccgctactatagctcatcttggagcgaatgggcatctgtgccctgcagtggatccgcaaccaattttagtctacttaaacaagcaggtgatgtagaagaaaatccaggtccaatgtggccccctgggtcagcctcccagccaccgccctcacctgccgcggccacaggtctgcatccagcggctcgccctgtgtccctgcagtgccggctcagcatgtgtccagcgcgcagcctcctccttgtggctaccctggtcctcctggaccacctcagtttggccagaaacctccccgtggccactccagacccaggaatgttcccatgccttcaccactcccaaaacctgctgagggccgtcagcaacatgctccagaaggccagacaaactctagaattttacccttgcacttctgaagagattgatcatgaagatatcacaaaagataaaaccagcacagtggaggcctgtttaccattggaattaaccaagaatgagagttgcctaaattccagagagacctctttcataactaatgggagttgcctggcctccagaaagacctcttttatgatggccctgtgccttagtagtatttatgaagacttgaagatgtaccaggtggagttcaagaccatgaatgcaaagcttctgatggaccctaagaggcagatctttctagatcaaaacatgctggcagttattgatgagctgatgcaggccctgaatttcaacagtgagactgtgccacaaaaatcctcccttgaagaaccggatttttataaaactaaaatcaagctctgcatacttcttcatgctttcagaattcgggcagtgactattgatagagtgatgagctatctgaatgcttccggagctactaacttcagcctgctgaagcaggctggagacgtggaggagaaccctggacctttgagcaagggcgaggaggacaacatggccatcatcaaggagttcatgcgcttcaaggtgcacatggagggctccgtgaacggccacgagttcgagatcgagggcgagggcgagggccgcccctacgagggcacccagaccgccaagctgaaggtgaccaagggcggccccctgcccttcgcctgggacatcctgtcccctcagttcatgtacggctccaaggcctacgtgaagcaccccgccgacatccccgactacttgaagctgtccttccccgagggcttcaagtgggagcgcgtgatgaacttcgaggacggcggcgtggtgaccgtgacccaggactcctccctgcaggacggcgagttcatctacaaggtgaagctgcgcggcaccaacttcccctccgacggccccgtaatgcagaagaagaccatgggctgggaggcctcctccgagcggatgtaccccgaggacggcgccctgaagggcgagatcaagcagaggctgaagctgaaggacggcggccactacgacgccgaggtcaagaccacctacaaggccaagaagcccgtgcagctgcccggcgcctacaacgtcaacatcaagctggacatcacctcccacaacgaggactacaccatcgtggaacagtacgagcgcgccgagggccgccactccaccggcggcatggacgagctgtacaagtaa

SEQ ID NO: 853 - DNA, 1170 bp, Artificial Sequence
  Description of Artificial Sequence: Synthetic polynucleotide
atggactggacatggatactcttcctggtagcagccgccacacgagtgcacagcaactgggtgaatgtaataagtgatttgaaaaaaattgaagatcttattcaatctatgcatattgatgctactttatatacggaaagtgatgttcaccccagttgcaaagtaacagcaatgaagtgctttctcttggagttacaagttatttcacttgagtccggagatgcaagtattcatgatacagtagaaaatctgatcatcctagcaaacaacagtttgtcttctaatgggaatgtaacagaatctggatgcaaagaatgtgaggaactggaggaaaaaaatattaaagaatttttgcagagttttgtacatattgtccaaatgttcatcaacacttctggatccggagctactaacttcagcctgctgaagcaggctggagacgtggaggagaaccctggacctttgagcaagggcgaggaggacaacatggccatcatcaaggagttcatgcgcttcaaggtgcacatggagggctccgtgaacggccacgagttcgagatcgagggcgagggcgagggccgcccctacgagggcacccagaccgccaagctgaaggtgaccaagggcggccccctgcccttcgcctgggacatcctgtcccctcagttcatgtacggctccaaggcctacgtgaagcaccccgccgacatccccgactacttgaagctgtccttccccgagggcttcaagtgggagcgcgtgatgaacttcgaggacggcggcgtggtgaccgtgacccaggactcctccctgcaggacggcgagttcatctacaaggtgaagctgcgcggcaccaacttcccctccgacggccccgtaatgcagaagaagaccatgggctgggaggcctcctccgagcggatgtaccccgaggacggcgccctgaagggcgagatcaagcagaggctgaagctgaaggacggcggccactacgacgccgaggtcaagaccacctacaaggccaagaagcccgtgcagctgcccggcgcctacaacgtcaacatcaagctggacatcacctcccacaacgaggactacaccatcgtggaacagtacgagcgcgccgagggccgccactccaccggcggcatggacgagctgtacaagtaa

SEQ ID NO: 854 - DNA, 1734 bp, Artificial Sequence
  Description of Artificial Sequence: Synthetic polynucleotide
atggactggacatggatactcttcctggtagcagccgccacacgagtgcacagcaactgggtgaatgtaataagtgatttgaaaaaaattgaagatcttattcaatctatgcatattgatgctactttatatacggaaagtgatgttcaccccagttgcaaagtaacagcaatgaagtgctttctcttggagttacaagttatttcacttgagtccggagatgcaagtattcatgatacagtagaaaatctgatcatcctagcaaacaacagtttgtcttctaatgggaatgtaacagaatctggatgcaaagaatgtgaggaactggaggaaaaaaatattaaagaatttttgcagagttttgtacatattgtccaaatgttcatcaacacttctggttccgttggttcgctaaactgcatcgtcgctgtgtcccagaacatgggcatcggcaagaacggggacctgccctggccaccgctcaggaatgaattcagatatttccagagaatgaccacaacctcttcagtagaaggtaaacagaatctggtgattatgggtaagaagacctggttctccattcctgagaagaatcgacctttaaagggtagaattaatttagttctcagcagagaactcaaggaacctccacaaggagctcattttctttccagaagtctagatgatgccttaaaacttactgaacaaccagaattagcaaataaagtagacatggtctggatagttggtggcagttctgttattaaggaagccatgaatcacccaggccatcttaaactatttgtgacaaggatcatgcaagactttgaaagtgacacgttttttccagaaattgatttggagaaatataaacttctgccagaatacccaggtgttctctctgatgtccaggaggagaaaggcattaagtacaaatttgaagtatatgagaagaatgatggatccggagctactaacttcagcctgctgaagcaggctggagacgtggaggagaaccctggacctttgagcaagggcgaggaggacaacatggccatcatcaaggagttcatgcgcttcaaggtgcacatggagggctccgtgaacggccacgagttcgagatcgagggcgagggcgagggccgcccctacgagggcacccagaccgccaagctgaaggtgaccaagggcggccccctgcccttcgcctgggacatcctgtcccctcagttcatgtacggctccaaggcctacgtgaagcaccccgccgacatccccgactacttgaagctgtccttccccgagggcttcaagtgggagcgcgtgatgaacttcgaggacggcggcgtggtgaccgtgacccaggactcctccctgcaggacggcgagttcatctacaaggtgaagctgcgcggcaccaacttcccctccgacggccccgtaatgcagaagaagaccatgggctgggaggcctcctccgagcggatgtaccccgaggacggcgccctgaagggcgagatcaagcagaggctgaagctgaaggacggcggccactacgacgccgaggtcaagaccacctacaaggccaagaagcccgtgcagctgcccggcgcctacaacgtcaacatcaagctggacatcacctcccacaacgaggactacaccatcgtggaacagtacgagcgcgccgagggccgccactccaccggcggcatggacgagctgtacaagtaa

SEQ ID NO: 855 - protein, 175 aa, Artificial Sequence
  Description of Artificial Sequence: Synthetic Construct
ITCPPPMSVEHADIWVKSYSLYSRERYICNSGFKRKAGTSSLTECVLNKATNVAHWTTPSLKCIRDPALVHQRPAPPSTVTTAGVTPQPESLSPSGKEPAASSPSSNNTAATTAAIVPGSQLMPSKSPSTGTTEISSHESSHGTPSQTTAKNWELTASASHQPPGVYPQGHSDTT

SEQ ID NO: 856 - DNA, 525 bp, Artificial Sequence
  Description of Artificial Sequence: Synthetic Construct
attacctgcccccctccgatgagcgtggagcacgccgacatctgggtcaagagctacagcttgtatagtagggagcggtacatctgtaacagcgggttcaagaggaaggccgggaccagctcactgaccgagtgcgtgttgaacaaggccaccaacgtggcccactggaccacccctagccttaagtgcatcagggacccagcgctcgtacaccagagacccgcgcctccctctacggtaaccacggcaggcgtaaccccccagcccgagagcctgtccccgagcggcaaggagcctgcagcgagcagcccctcaagcaacaacacagccgctaccaccgcggcaatcgtgcccggcagccagctgatgccctcaaagagccccagcaccggcaccactgagataagcagccacgagagctcacacggcactccctcacagaccactgccaagaattgggagctgaccgcctctgccagccaccagcccccaggcgtgtatccccagggccacagcgacaccacg

SEQ ID NO: 857 - protein, 235 aa, Artificial Sequence
  Description of Artificial Sequence: Synthetic Construct
MSKGEEDNMAIIKEFMRFKVHMEGSVNGHEFEIEGEGEGRPYEGTQTAKLKVTKGGPLPFAWDILSPQFMYGSKAYVKHPADIPDYLKLSFPEGFKWERVMNFEDGGVVTVTQDSSLQDGEFIYKVKLRGTNFPSDGPVMQKKTMGWEASSERMYPEDGALKGEIKQRLKLKDGGHYDAEVKTTYKAKKPVQLPGAYNVNIKLDITSHNEDYTIVEQYERAEGRHSTGGMDELYK

SEQ ID NO: 858 - DNA, 708 bp, Artificial Sequence
  Description of Artificial Sequence: Synthetic Construct
atgagcaagggcgaggaggataacatggccatcatcaaggagttcatgcgcttcaaggtgcacatggagggctccgtgaacggccacgagttcgagatcgagggcgagggcgagggccgcccctacgagggcacccagaccgccaagctgaaggtgaccaagggtggccccctgcccttcgcctgggacatcctgtcccctcagttcatgtacggctccaaggcctacgtgaagcaccccgccgacatccccgactacttgaagctgtccttccccgagggcttcaagtgggagcgcgtgatgaacttcgaggacggcggcgtggtgaccgtgacccaggactcctccctgcaggacggcgagttcatctacaaggtgaagctgcgcggcaccaacttcccctccgacggccccgtaatgcagaagaagaccatgggctgggaggcctcctccgagcggatgtaccccgaggacggcgccctgaagggcgagatcaagcagaggctgaagctgaaggacggcggccactacgacgctgaggtcaagaccacctacaaggccaagaagcccgtgcagctgcccggcgcctacaacgtcaacatcaagttggacatcacctcccacaacgaggactacaccatcgtggaacagtacgaacgcgccgagggccgccactccaccggcggcatggacgagctgtacaagtaa

SEQ ID NO: 859 - protein, 583 aa, Artificial Sequence
  Description of Artificial Sequence: Synthetic Construct
MDWTWILFLVAAATRVHSNWVNVISDLKKIEDLIQSMHIDATLYTESDVHPSCKVTAMKCFLLELQVISLESGDASIHDTVENLIILANNSLSSNGNVTESGCKECEELEEKNIKEFLQSFVHIVQMFINTSSGGGSGGGGSGGGGSGGGGSGGGSLQITCPPPMSVEHADIWVKSYSLYSRERYICNSGFKRKAGTSSLTECVLNKATNVAHWTTPSLKCIRDPALVHQRPAPPSTVTTAGVTPQPESLSPSGKEPAASSPSSNNTAATTAAIVPGSQLMPSKSPSTGTTEISSHESSHGTPSQTTAKNWELTASASHQPPGVYPQGHSDTTVAISTSTVLLCGLSAVSLLACYLKSRQTPPLASVEMEAMEALPVTWGTSSRDEDLENCSHHLSGVGSLNCIVAVSQNMGIGKNGDLPWPPLRNEFRYFQRMTTTSSVEGKQNLVIMGKKTWFSIPEKNRPLKGRINLVLSRELKEPPQGAHFLSRSLDDALKLTEQPELANKVDMVWIVGGSSVYKEAMNHPGHLKLFVTRIMQDFESDTFFPEIDLEKYKLLPEYPGVLSDVQEEKGIKYKFEVYEEND

SEQ ID NO: 860 - protein, 583 aa, Artificial Sequence
  Description of Artificial Sequence: Synthetic Construct
MDWTWILFLVAAATRVHSNWVNVISDLKKIEDLIQSMHIDATLYTESDVHPSCKVTAMKCFLLELQVISLESGDASIHDTVENLIILANNSLSSNGNVTESGCKECEELEEKNIKEFLQSFVHIVQMFINTSSGGGSGGGGSGGGGSGGGGSGGGSLQITCPPPMSVEHADIWVKSYSLYSRERYICNSGFKRKAGTSSLTECVLNKATNVAHWTTPSLKCIRDPALVHQRPAPPSTVTTAGVTPQPESLSPSGKEPAASSPSSNNTAATTAAIVPGSQLMPSKSPSTGTTEISSHESSHGTPSQTTAKNWELTASASHQPPGVYPQGHSDTTVAISTSTVLLCGLSAVSLLACYLKSRQTPPLASVEMEAMEALPVTWGTSSRDEDLENCSHHLSGVGSLNCIVAVSQNMGIGKNGDLPWPPLRNEFRYFQRMTTTSSVEGKQNLVIMGKKTWFSIPEKNRPLKGRINLVLSRELKEPPQGAHFLSRSLDDALKLTEQPELANKVDMVWIVGGSSVYKEAMNHPGHLKLFVTRIMQDFESDTFFPEIDLEKYKLLPGYPGVLSDVQEEKGFKYKFEVYEKND

SEQ ID NO: 861 - protein, 583 aa, Artificial Sequence
  Description of Artificial Sequence: Synthetic Construct
MDWTWILFLVAAATRVHSNWVNVISDLKKIEDLIQSMHIDATLYTESDVHPSCKVTAMKCFLLELQVISLESGDASIHDTVENLIILANNSLSSNGNVTESGCKECEELEEKNIKEFLQSFVHIVQMFINTSSGGGSGGGGSGGGGSGGGGSGGGSLQITCPPPMSVEHADIWVKSYSLYSRERYICNSGFKRKAGTSSLTECVLNKATNVAHWTTPSLKCIRDPALVHQRPAPPSTVTTAGVTPQPESLSPSGKEPAASSPSSNNTAATTAAIVPGSQLMPSKSPSTGTTEISSHESSHGTPSQTTAKNWELTASASHQPPGVYPQGHSDTTVAISTSTVLLCGLSAVSLLACYLKSRQTPPLASVEMEAMEALPVTWGTSSRDEDLENCSHHLSGVGSLNCIVAVSQNMGIGKNGDLPWPPLRNEFRYFQRMTTTSSVEGKQNLVIMGKKTWFSIPEKNRPLKGRINLVLSRELKEPPQGAHFLSRSLDDALKLTEQPELANKVDMVWIVGGSSVYKEAMYHPGHLKLFVTRIMQDFESDTFFPEIDLEKYKLLPEYPGVLSDVQEEKGIKYKFEVYEKND

SEQ ID NO: 862 - protein, 404 aa, Artificial Sequence
  Description of Artificial Sequence: Synthetic Construct
MDWTWILFLVAAATRVHSNWVNVISDLKKIEDLIQSMHIDATLYTESDVHPSCKVTAMKCFLLELQVISLESGDASIHDTVENLIILANNSLSSNGNVTESGCKECEELEEKNIKEFLQSFVHIVQMFINTSSGGGSGGGGSGGGGSGGGGSGGGSLQYPYDVPDYAITCPPPMSVEHADIWVKSYSLYSRERYICNSGFKRKAGTSSLTECVLNKATNVAHWTTPSLKCIRDPALVHQRPAPPSTVTTAGVTPQPESLSPSGKEPAASSPSSNNTAATTAAIVPGSQLMPSKSPSTGTTEISSHESSHGTPSQTTAKNWELTASASHQPPGVYPQGHSDTTVAISTSTVLLCGLSAVSLLACYLKSRQTPPLASVEMEAMEALPVTWGTSSRDEDLENCSHHL

SEQ ID NO: 863 - protein, 412 aa, Artificial Sequence
  Description of Artificial Sequence: Synthetic Construct
MDWTWILFLVAAATRVHSDYKDDDDKNWVNVISDLKKIEDLIQSMHIDATLYTESDVHPSCKVTAMKCFLLELQVISLESGDASIHDTVENLIILANNSLSSNGNVTESGCKECEELEEKNIKEFLQSFVHIVQMFINTSSGGGSGGGGSGGGGSGGGGSGGGSLQYPYDVPDYAITCPPPMSVEHADIWVKSYSLYSRERYICNSGFKRKAGTSSLTECVLNKATNVAHWTTPSLKCIRDPALVHQRPAPPSTVTTAGVTPQPESLSPSGKEPAASSPSSNNTAATTAAIVPGSQLMPSKSPSTGTTEISSHESSHGTPSQTTAKNWELTASASHQPPGVYPQGHSDTTVAISTSTVLLCGLSAVSLLACYLKSRQTPPLASVEMEAMEALPVTWGTSSRDEDLENCSHHL

SEQ ID NO: 864 - protein, 403 aa, Artificial Sequence
  Description of Artificial Sequence: Synthetic Construct
MDWTWILFLVAAATRVHSNWVNVISDLKKIEDLIQSMHIDATLYTESDVHPSCKVTAMKCFLLELQVISLESGDASIHDTVENLIILANNSLSSNGNVTESGCKECEELEEKNIKEFLQSFVHIVQMFINTSSGGGSGGGGSGGGGSGGGGSGGGGSGGGGSGGGSITCPPPMSVEHADIWVKSYSLYSRERYICNSGFKRKAGTSSLTECVLNKATNVAHWTTPSLKCIRDPALVHQRPAPPSTVTTAGVTPQPESLSPSGKEPAASSPSSNNTAATTAAIVPGSQLMPSKSPSTGTTEISSHESSHGTPSQTTAKNWELTASASHQPPGVYPQGHSDTTVAISTSTVLLCGLSAVSLLACYLKSRQTPPLASVEMEAMEALPVTWGTSSRDEDLENCSHHL

SEQ ID NO: 865 - protein, 403 aa, Artificial Sequence
  Description of Artificial Sequence: Synthetic Construct
MDWTWILFLVAAATRVHSNWVNVISDLKKIEDLIQSMHIDATLYTESDVHPSCKVTAMKCFLLELQVISLESGDASIHDTVENLIILANNSLSSNGNVTESGCKECEELEEKNIKEFLQSFVHIVQMFINTSSGGGSGGGGSGGGGSGGGGSYPYDVPDYASGGGSITCPPPMSVEHADIWVKSYSLYSRERYICNSGFKRKAGTSSLTECVLNKATNVAHWTTPSLKCIRDPALVHQRPAPPSTVTTAGVTPQPESLSPSGKEPAASSPSSNNTAATTAAIVPGSQLMPSKSPSTGTTEISSHESSHGTPSQTTAKNWELTASASHQPPGVYPQGHSDTTVAISTSTVLLCGLSAVSLLACYLKSRQTPPLASVEMEAMEALPVTWGTSSRDEDLENCSHHL

SEQ ID NO: 866 - protein, 371 aa, Artificial Sequence
  Description of Artificial Sequence: Synthetic Construct
MDWTWILFLVAAATRVHSNWVNVISDLKKIEDLIQSMHIDATLYTESDVHPSCKVTAMKCFLLELQVISLESGDASIHDTVENLIILANNSLSSNGNVTESGCKECEELEEKNIKEFLQSFVHIVQMFINTSSGITCPPPMSVEHADIWVKSYSLYSRERYICNSGFKRKAGTSSLTECVLNKATNVAHWTTPSLKCIRDPALVHQRPAPPSTVTTAGVTPQPESLSPSGKEPAASSPSSNNTAATTAAIVPGSQLMPSKSPSTGTTEISSHESSHGTPSQTTAKNWELTASASHQPPGVYPQGHSDTTVAISTSTVLLCGLSAVSLLACYLKSRQTPPLASVEMEAMEALPVTWGTSSRDEDLENCSHHL

SEQ ID NO: 867 - protein, 407 aa, Artificial Sequence
  Description of Artificial Sequence: Synthetic Construct
MAPRRARGCRTLGLPALLLLLLLRPPATRGNWVNVISDLKKIEDLIQSMHIDATLYTESDVHPSCKVTAMKCFLLELQVISLESGDASIHDTVENLIILANNSLSSNGNVTESGCKECEELEEKNIKEFLQSFVHIVQMFINTSSGGGSGGGGSGGGGSGGGGSGGGSLQITCPPPMSVEHADIWVKSYSLYSRERYICNSGFKRKAGTSSLTECVLNKATNVAHWTTPSLKCIRDPALVHQRPAPPSTVTTAGVTPQPESLSPSGKEPAASSPSSNNTAATTAAIVPGSQLMPSKSPSTGTTEISSHESSHGTPSQTTAKNWELTASASHQPPGVYPQGHSDTTVAISTSTVLLCGLSAVSLLACYLKSRQTPPLASVEMEAMEALPVTWGTSSRDEDLENCSHHL

SEQ ID NO: 868 - protein, 397 aa, Artificial Sequence
  Description of Artificial Sequence: Synthetic Construct
MDWTWILFLVAAATRVHSNWVNVISDLKKIEDLIQSMHIDATLYTESDVHPSCKVTAMKCFLLELQVISLESGDASIHDTVENLIILANNSLSSNGNVTESGCKECEELEEKNIKEFLQSFVHIVQMFINTSSGGGSGGGGSGGGGSGGGGSGGGSLQITCPPPMSVEHADIWVKSYSLYSRERYICNSGFKRKAGTSSLTECVLNKATNVAHWTTPSLKCIRDPALVHQRPAPPSTVTTAGVTPQPESLSPSGKEPAASSPSSNNTAATTAAIVPGSQLMPSKSPSTGTTEISSHESSHGTPSQTTAKNWELTASASHQPPGVYPQGHSDTTVAISTSTVLLCGLSAVSLLACYLKSRQTPPLASVEMEAMEALPVTWGTSSRDEDLENCSHHLGS

SEQ ID NO: 869 - protein, 555 aa, Artificial Sequence; identical to SEQ ID NO: 636
  Description of Artificial Sequence: Synthetic Construct

SEQ ID NO: 870 - protein, 407 aa, Artificial Sequence; identical to SEQ ID NO: 867
  Description of Artificial Sequence: Synthetic Construct

SEQ ID NO: 871 - protein, 371 aa, Artificial Sequence
  Description of Artificial Sequence: Synthetic Construct
MDWTWILFLVAAATRVHSNWVNVISDLKKIEDLIQSMHIDATLYTESDVHPSCKVTAMKCFLLELQVISLESGDASIHDTVENLIILANNSLSSNGNVTESGCKECEELEEKNIKEFLQSFVHIVQMFINTSGSITCPPPMSVEHADIWVKSYSLYSRERYICNSGFKRKAGTSSLTECVLNKATNVAHWTTPSLKCIRDPALVHQRPAPPSTVTTAGVTPQPESLSPSGKEPAASSPSSNNTAATTAAIVPGSQLMPSKSPSTGTTEISSHESSHGTPSQTTAKNWELTASASHQPPGVYPQGHSDTTVAISTSTVLLCGLSAVSLLACYLKSRQTPPLASVEMEAMEALPVTWGTSSRDEDLENCSHHL

SEQ ID NO: 872 - protein, 573 aa, Artificial Sequence
  Description of Artificial Sequence: Synthetic Construct
MDWTWILFLVAAATRVHSDYKDDDDKNWVNVISDLKKIEDLIQSMHIDATLYTESDVHPSCKVTAMKCFLLELQVISLESGDASIHDTVENLIILANNSLSSNGNVTESGCKECEELEEKNIKEFLQSFVHIVQMFINTSSGGGSGGGGSGGGGSGGGGSGGGSLQYPYDVPDYAITCPPPMSVEHADIWVKSYSLYSRERYICNSGFKRKAGTSSLTECVLNKATNVAHWTTPSLKCIRDPALVHQRPAPPSTVTTAGVTPQPESLSPSGKEPAASSPSSNNTAATTAAIVPGSQLMPSKSPSTGTTEISSHESSHGTPSQTTAKNWELTASASHQPPGVYPQGHSDTTVAISTSTVLLCGLSAVSLLACYLKSRQTPPLASVEMEAMEALPVTWGTSSRDEDLENCSHHLGSGISLIAALAVDYVIGMENAMPWNLPADLAWFKRNTLNKPVIMGRHTWESIGRPLPGRKNIILSSQPGTDDRVTWVKSVDEAIAACGDVPEIMVIGGGRVIEQFLPKAQKLYLTHIDAEVEGDTHFPDYEPDDWESVFSEFHDADAQNSHSYCFEILERR

SEQ ID NO: 873 - protein, 414 aa, Artificial Sequence
  Description of Artificial Sequence: Synthetic Construct
MDWTWILFLVAAATRVHSDYKDDDDKNWVNVISDLKKIEDLIQSMHIDATLYTESDVHPSCKVTAMKCFLLELQVISLESGDASIHDTVENLIILANNSLSSNGNVTESGCKECEELEEKNIKEFLQSFVHIVQMFINTSSGGGSGGGGSGGGGSGGGGSGGGSLQYPYDVPDYAITCPPPMSVEHADIWVKSYSLYSRERYICNSGFKRKAGTSSLTECVLNKATNVAHWTTPSLKCIRDPALVHQRPAPPSTVTTAGVTPQPESLSPSGKEPAASSPSSNNTAATTAAIVPGSQLMPSKSPSTGTTEISSHESSHGTPSQTTAKNWELTASASHQPPGVYPQGHSDTTVAISTSTVLLCGLSAVSLLACYLKSRQTPPLASVEMEAMEALPVTWGTSSRDEDLENCSHHLGS

SEQ ID NO: 874 - protein, 601 aa, Artificial Sequence
  Description of Artificial Sequence: Synthetic Construct
MDWTWILFLVAAATRVHSDYKDDDDKNWVNVISDLKKIEDLIQSMHIDATLYTESDVHPSCKVTAMKCFLLELQVISLESGDASIHDTVENLIILANNSLSSNGNVTESGCKECEELEEKNIKEFLQSFVHIVQMFINTSSGGGSGGGGSGGGGSGGGGSGGGSLQYPYDVPDYAITCPPPMSVEHADIWVKSYSLYSRERYICNSGFKRKAGTSSLTECVLNKATNVAHWTTPSLKCIRDPALVHQRPAPPSTVTTAGVTPQPESLSPSGKEPAASSPSSNNTAATTAAIVPGSQLMPSKSPSTGTTEISSHESSHGTPSQTTAKNWELTASASHQPPGVYPQGHSDTTVAISTSTVLLCGLSAVSLLACYLKSRQTPPLASVEMEAMEALPVTWGTSSRDEDLENCSHHLGSGVGSLNCIVAVSQNMGIGKNGDLPWPPLRNEFRYFQRMTTTSSVEGKQNLVIMGKKTWFSIPEKNRPLKGRINLVLSRELKEPPQGAHFLSRSLDDALKLTEQPELANKVDMVWIVGGSSVYKEAMNHPGHLKLFVTRIMQDFESDTFFPEIDLEKYKLLPEYPGVLSDVQEEKGIKYKFEVYEEND

SEQ ID NO: 875 - protein, 601 aa, Artificial Sequence
  Description of Artificial Sequence: Synthetic Construct
MDWTWILFLVAAATRVHSDYKDDDDKNWVNVISDLKKIEDLIQSMHIDATLYTESDVHPSCKVTAMKCFLLELQVISLESGDASIHDTVENLIILANNSLSSNGNVTESGCKECEELEEKNIKEFLQSFVHIVQMFINTSSGGGSGGGGSGGGGSGGGGSGGGSLQYPYDVPDYAITCPPPMSVEHADIWVKSYSLYSRERYICNSGFKRKAGTSSLTECVLNKATNVAHWTTPSLKCIRDPALVHQRPAPPSTVTTAGVTPQPESLSPSGKEPAASSPSSNNTAATTAAIVPGSQLMPSKSPSTGTTEISSHESSHGTPSQTTAKNWELTASASHQPPGVYPQGHSDTTVAISTSTVLLCGLSAVSLLACYLKSRQTPPLASVEMEAMEALPVTWGTSSRDEDLENCSHHLGSGVGSLNCIVAVSQNMGIGKNGDLPWPPLRNEFRYFQRMTTTSSVEGKQNLVIMGKKTWFSIPEKNRPLKGRINLVLSRELKEPPQGAHFLSRSLDDALKLTEQPELANKVDMVWIVGGSSVYKEAMNHPGHLKLFVTRIMQDFESDTFFPEIDLEKYKLLPGYPGVLSDVQEEKGFKYKFEVYEKND

SEQ ID NO: 876 - protein, 601 aa, Artificial Sequence
  Description of Artificial Sequence: Synthetic Construct
MDWTWILFLVAAATRVHSDYKDDDDKNWVNVISDLKKIEDLIQSMHIDATLYTESDVHPSCKVTAMKCFLLELQVISLESGDASIHDTVENLIILANNSLSSNGNVTESGCKECEELEEKNIKEFLQSFVHIVQMFINTSSGGGSGGGGSGGGGSGGGGSGGGSLQYPYDVPDYAITCPPPMSVEHADIWVKSYSLYSRERYICNSGFKRKAGTSSLTECVLNKATNVAHWTTPSLKCIRDPALVHQRPAPPSTVTTAGVTPQPESLSPSGKEPAASSPSSNNTAATTAAIVPGSQLMPSKSPSTGTTEISSHESSHGTPSQTTAKNWELTASASHQPPGVYPQGHSDTTVAISTSTVLLCGLSAVSLLACYLKSRQTPPLASVEMEAMEALPVTWGTSSRDEDLENCSHHLGSGVGSLNCIVAVSQNMGIGKNGDLPWPPLRNEFRYFQRMTTTSSVEGKQNLVIMGKKTWFSIPEKNRPLKGRINLVLSRELKEPPQGAHFLSRSLDDALKLTEQPELANKVDMVWIVGGSSVYKEAMNHPGRLKLFVTRIMQDFGSDTFFPEIDLEKYKLLPEYPGVLSDVQEEKGIKYKFEVYEKND

SEQ ID NO: 877 - protein, 601 aa, Artificial Sequence
  Description of Artificial Sequence: Synthetic Construct
MDWTWILFLVAAATRVHSDYKDDDDKNWVNVISDLKKIEDLIQSMHIDATLYTESDVHPSCKVTAMKCFLLELQVISLESGDASIHDTVENLIILANNSLSSNGNVTESGCKECEELEEKNIKEFLQSFVHIVQMFINTSSGGGSGGGGSGGGGSGGGGSGGGSLQYPYDVPDYAITCPPPMSVEHADIWVKSYSLYSRERYICNSGFKRKAGTSSLTECVLNKATNVAHWTTPSLKCIRDPALVHQRPAPPSTVTTAGVTPQPESLSPSGKEPAASSPSSNNTAATTAAIVPGSQLMPSKSPSTGTTEISSHESSHGTPSQTTAKNWELTASASHQPPGVYPQGHSDTTVAISTSTVLLCGLSAVSLLACYLKSRQTPPLASVEMEAMEALPVTWGTSSRDEDLENCSHHLGSGVGSLNCIVAVSQNMGVGKNGDLPWPPLRNEFRYFQRMTTTSSVEGKQNLVIMGKKTWFSIPEKNRPLKGRINLVLSRELKEPPQGAHFLSRSLDDALKLTEQPELANKVDMVWIVGGSSVYKEAMNHPGHLKLFVTRIMQDFESDTFFPEIDLEKYKLLPEYPGVLSDVQEEKGIKYKFEVYEKND

SEQ ID NO: 878 - protein, 601 aa, Artificial Sequence
  Description of Artificial Sequence: Synthetic Construct
MDWTWILFLVAAATRVHSDYKDDDDKNWVNVISDLKKIEDLIQSMHIDATLYTESDVHPSCKVTAMKCFLLELQVISLESGDASIHDTVENLIILANNSLSSNGNVTESGCKECEELEEKNIKEFLQSFVHIVQMFINTSSGGGSGGGGSGGGGSGGGGSGGGSLQYPYDVPDYAITCPPPMSVEHADIWVKSYSLYSRERYICNSGFKRKAGTSSLTECVLNKATNVAHWTTPSLKCIRDPALVHQRPAPPSTVTTAGVTPQPESLSPSGKEPAASSPSSNNTAATTAAIVPGSQLMPSKSPSTGTTEISSHESSHGTPSQTTAKNWELTASASHQPPGVYPQGHSDTTVAISTSTVLLCGLSAVSLLACYLKSRQTPPLASVEMEAMEALPVTWGTSSRDEDLENCSHHLGSGVGSLNCIVAVSQNMGIGKNGDLPWPPLRNEFRYFQRMTTTSSVEGKQNLVIMGKKTWFSIPEKNRPLKGRINLVLSRELKEPPQGAHFLSRSLDDALKLTEQPELANKVDMVWIVGGSSVYKEAMYHPGHLKLFVTRIMQDFESDTFFPEIDLEKYKLLPEYPGVLSDVQEEKGIKYKFEVYEKND

SEQ ID NO: 879 - protein, 601 aa, Artificial Sequence
  Description of Artificial Sequence: Synthetic Construct
MDWTWILFLVAAATRVHSDYKDDDDKNWVNVISDLKKIEDLIQSMHIDATLYTESDVHPSCKVTAMKCFLLELQVISLESGDASIHDTVENLIILANNSLSSNGNVTESGCKECEELEEKNIKEFLQSFVHIVQMFINTSSGGGSGGGGSGGGGSGGGGSGGGSLQYPYDVPDYAITCPPPMSVEHADIWVKSYSLYSRERYICNSGFKRKAGTSSLTECVLNKATNVAHWTTPSLKCIRDPALVHQRPAPPSTVTTAGVTPQPESLSPSGKEPAASSPSSNNTAATTAAIVPGSQLMPSKSPSTGTTEISSHESSHGTPSQTTAKNWELTASASHQPPGVYPQGHSDTTVAISTSTVLLCGLSAVSLLACYLKSRQTPPLASVEMEAMEALPVTWGTSSRDEDLENCSHHLGSGVGSLNCIVAVSQNMGVGKNGDLPWPPLRNEFRYFQRMTTTSSVEGKQNLVIMGKKTWFSIPEKNRPLKGRINLVLSRELKEPPQGAHFLSRSLDDALKLTEQPELANKVDMVWIVGGSSVIKEAMNHPGHLKLFVTRIMQDFESDTFFPEIDLEKYKLLPEYPGVLSDVQEEKGIKYKFEVYEKND

SEQ ID NO: 880 - protein, 681 aa, Artificial Sequence
  Description of Artificial Sequence: Synthetic Construct
MDWTWILFLVAAATRVHSNWVNVISDLKKIEDLIQSMHIDATLYTESDVHPSCKVTAMKCFLLELQVISLESGDASIHDTVENLIILANNSLSSNGNVTESGCKECEELEEKNIKEFLQSFVHIVQMFINTSSGGGSGGGGSGGGGSGGGGSGGGSLQITCPPPMSVEHADIWVKSYSLYSRERYICNSGFKRKAGTSSLTECVLNKATNVAHWTTPSLKCIRDPALVHQRPAPPSTVTTAGVTPQPESLSPSGKEPAASSPSSNNTAATTAAIVPGSQLMPSKSPSTGTTEISSHESSHGTPSQTTAKNWELTASASHQPPGVYPQGHSDTTVAISTSTVLLCGLSAVSLLACYLKSRQTPPLASVEMEAMEALPVTWGTSSRDEDLENCSHHLSRMDYKDDDDKDYKDDDDKDYKDDDDKSRGSGATNFSLLKQAGDVEENPGPLSKGEEDNMAIIKEFMRFKVHMEGSVNGHEFEIEGEGEGRPYEGTQTAKLKVTKGGPLPFAWDILSPQFMYGSKAYVKHPADIPDYLKLSFPEGFKWERVMNFEDGGVVTVTQDSSLQDGEFIYKVKLRGTNFPSDGPVMQKKTMGWEASSERMYPEDGALKGEIKQRLKLKDGGHYDAEVKTTYKAKKPVQLPGAYNVNIKLDITSHNEDYTIVEQYERAEGRHSTGGMDELYK

SEQ ID NO: 881 - protein, 652 aa, Artificial Sequence
  Description of Artificial Sequence: Synthetic Construct
MDWTWILFLVAAATRVHSNWVNVISDLKKIEDLIQSMHIDATLYTESDVHPSCKVTAMKCFLLELQVISLESGDASIHDTVENLIILANNSLSSNGNVTESGCKECEELEEKNIKEFLQSFVHIVQMFINTSSGGGSGGGGSGGGGSGGGGSGGGSLQITCPPPMSVEHADIWVKSYSLYSRERYICNSGFKRKAGTSSLTECVLNKATNVAHWTTPSLKCIRDPALVHQRPAPPSTVTTAGVTPQPESLSPSGKEPAASSPSSNNTAATTAAIVPGSQLMPSKSPSTGTTEISSHESSHGTPSQTTAKNWELTASASHQPPGVYPQGHSDTTVAISTSTVLLCGLSAVSLLACYLKSRQTPPLASVEMEAMEALPVTWGTSSRDEDLENCSHHLGSGATNFSLLKQAGDVEENPGPLSKGEEDNMAIIKEFMRFKVHMEGSVNGHEFEIEGEGEGRPYEGTQTAKLKVTKGGPLPFAWDILSPQFMYGSKAYVKHPADIPDYLKLSFPEGFKWERVMNFEDGGVVTVTQDSSLQDGEFIYKVKLRGTNFPSDGPVMQKKTMGWEASSERMYPEDGALKGEIKQRLKLKDGGHYDAEVKTTYKAKKPVQLPGAYNVNIKLDITSHNEDYTIVEQYERAEGRHSTGGMDELYK

SEQ ID NO: 882 - protein, 267 aa, Artificial Sequence
  Description of Artificial Sequence: Synthetic Construct
MAPRRARGCRTLGLPALLLLLLLRPPATRGITCPPPMSVEHADIWVKSYSLYSRERYICNSGFKRKAGTSSLTECVLNKATNVAHWTTPSLKCIRDPALVHQRPAPPSTVTTAGVTPQPESLSPSGKEPAASSPSSNNTAATTAAIVPGSQLMPSKSPSTGTTEISSHESSHGTPSQTTAKNWELTASASHQPPGVYPQGHSDTTVAISTSTVLLCGLSAVSLLACYLKSRQTPPLASVEMEAMEALPVTWGTSSRDEDLENCSHHL

SEQ ID NO: 883 - protein, 402 aa, Artificial Sequence
  Description of Artificial Sequence: Synthetic Construct
MDWTWILFLVAAATRVHSNWVNVISDLKKIEDLIQSMHIDATLYTESDVHPSCKVTAMKCFLLELQVISLESGDASIHDTVENLIILANNSLSSNGNVTESGCKECEELEEKNIKEFLQSFVHIVQMFINTSSGGGSGGGGSGGGGSGGGGSGGGSLQITCPPPMSVEHADIWVKSYSLYSRERYICNSGFKRKAGTSSLTECVLNKATNVAHWTTPSLKCIRDPALVHQRPAPPSTVTTAGVTPQPESLSPSGKEPAASSPSSNNTAATTAAIVPGSQLMPSKSPSTGTTEISSHESSHGTPSQTTAKNWELTASASHQPPGVYPQGHSDTTTTTPAPRPPTPAPTIASQPLSLRPEACRPAAGGAVHTRGLDFACDIYIWAPLAGTCGVLLLSLVITLYC

SEQ ID NO: 884 - DNA, 1752 bp, Artificial Sequence
  Description of Artificial Sequence: Synthetic Construct
atggactggacatggatactcttcctggtagcagccgccacacgagtgcacagcaactgggtgaacgtgatctccgacctgaaaaagatcgaggatttgatccagagcatgcacattgacgccaccctgtataccgagtccgacgtgcacccgagttgcaaggtgactgccatgaagtgcttcctgctggagctgcaagtgatcagcctggagagcggcgacgccagcatccacgacaccgtggaaaaccttatcattctggccaacaatagcctgagcagcaacggcaacgtgaccgaaagcggatgtaaggaatgcgaggaactggaagagaagaatatcaaagaattcctgcaaagcttcgtgcacatcgtgcagatgttcatcaacacttcttcaggtggcggtagtggtgggggaggatctggaggcggaggaagcgggggtggaggttcaggaggagggagcttgcaaattacctgcccccctccgatgagcgtggagcacgccgacatctgggtcaagagctacagcttgtatagtagggagcggtacatctgtaacagcgggttcaagaggaaggccgggaccagctcactgaccgagtgcgtgttgaacaaggccaccaacgtggcccactggaccacccctagccttaagtgcatcagggacccagcgctcgtacaccagagacccgcgcctccctctacggtaaccacggcaggcgtaaccccccagcccgagagcctgtccccgagcggcaaggagcctgcagcgagcagcccctcaagcaacaacacagccgctaccaccgcggcaatcgtgcccggcagccagctgatgccctcaaagagccccagcaccggcaccactgagataagcagccacgagagctcacacggcactccctcacagaccactgccaagaattgggagctgaccgcctctgccagccaccagcccccaggcgtgtatccccagggccacagcgacaccacggtcgccatcagcacatctacagtgcttttgtgcggccttagcgccgtgtcactgctggcatgctacttgaaaagtaggcaaactccccctcttgccagtgtggaaatggaggccatggaagccctgcccgtgacctggggcaccagttctagggacgaggaccttgagaactgctcacatcatttgagtggtgttggttcgctaaactgcatcgtcgctgtgtcccagaacatgggcatcggcaagaacggggacctgccctggccaccgctcaggaatgaattcagatatttccagagaatgaccacaacctcttcagtagaaggtaaacagaatctggtgattatgggtaagaagacctggttctccattcctgagaagaatcgacctttaaagggtagaattaatttagttctcagcagagaactcaaggaacctccacaaggagctcattttctttccagaagtctagatgatgccttaaaacttactgaacaaccagaattagcaaataaagtagacatggtctggatagttggtggcagttctgtttataaggaagccatgaatcacccaggccatcttaaactatttgtgacaaggatcatgcaagactttgaaagtgacacgttttttccagaaattgatttggagaaatataaacttctgccagaatacccaggtgttctctctgatgtccaggaggagaaaggcattaagtacaaatttgaagtatatgaggagaatgattga

SEQ ID NO: 885 - DNA, 1752 bp, Artificial Sequence
  Description of Artificial Sequence: Synthetic Construct
atggactggacatggatactcttcctggtagcagccgccacacgagtgcacagcaactgggtgaacgtgatctccgacctgaaaaagatcgaggatttgatccagagcatgcacattgacgccaccctgtataccgagtccgacgtgcacccgagttgcaaggtgactgccatgaagtgcttcctgctggagctgcaagtgatcagcctggagagcggcgacgccagcatccacgacaccgtggaaaaccttatcattctggccaacaatagcctgagcagcaacggcaacgtgaccgaaagcggatgtaaggaatgcgaggaactggaagagaagaatatcaaagaattcctgcaaagcttcgtgcacatcgtgcagatgttcatcaacacttcttcaggtggcggtagtggtgggggaggatctggaggcggaggaagcgggggtggaggttcaggaggagggagcttgcaaattacctgcccccctccgatgagcgtggagcacgccgacatctgggtcaagagctacagcttgtatagtagggagcggtacatctgtaacagcgggttcaagaggaaggccgggaccagctcactgaccgagtgcgtgttgaacaaggccaccaacgtggcccactggaccacccctagccttaagtgcatcagggacccagcgctcgtacaccagagacccgcgcctccctctacggtaaccacggcaggcgtaaccccccagcccgagagcctgtccccgagcggcaaggagcctgcagcgagcagcccctcaagcaacaacacagccgctaccaccgcggcaatcgtgcccggcagccagctgatgccctcaaagagccccagcaccggcaccactgagataagcagccacgagagctcacacggcactccctcacagaccactgccaagaattgggagctgaccgcctctgccagccaccagcccccaggcgtgtatccccagggccacagcgacaccacggtcgccatcagcacatctacagtgcttttgtgcggccttagcgccgtgtcactgctggcatgctacttgaaaagtaggcaaactccccctcttgccagtgtggaaatggaggccatggaagccctgcccgtgacctggggcaccagttctagggacgaggaccttgagaactgctcacatcatttgagtggtgttggttcgctaaactgcatcgtcgctgtgtcccagaacatgggcatcggcaagaacggggacctgccctggccaccgctcaggaatgaattcagatatttccagagaatgaccacaacctcttcagtagaaggtaaacagaatctggtgattatgggtaagaagacctggttctccattcctgagaagaatcgacctttaaagggtagaattaatttagttctcagcagagaactcaaggaacctccacaaggagctcattttctttccagaagtctagatgatgccttaaaacttactgaacaaccagaattagcaaataaagtagacatggtctggatagttggtggcagttctgtttataaggaagccatgaatcacccaggccatcttaaactatttgtgacaaggatcatgcaagactttgaaagtgacacgttttttccagaaattgatttggagaaatataaacttctgccaggatacccaggtgttctctctgatgtccaggaggagaaaggctttaagtacaaatttgaagtatatgagaagaatgattga

SEQ ID NO: 886 - DNA, 1752 bp, Artificial Sequence
  Description of Artificial Sequence: Synthetic Construct
atggactggacatggatactcttcctggtagcagccgccacacgagtgcacagcaactgggtgaacgtgatctccgacctgaaaaagatcgaggatttgatccagagcatgcacattgacgccaccctgtataccgagtccgacgtgcacccgagttgcaaggtgactgccatgaagtgcttcctgctggagctgcaagtgatcagcctggagagcggcgacgccagcatccacgacaccgtggaaaaccttatcattctggccaacaatagcctgagcagcaacggcaacgtgaccgaaagcggatgtaaggaatgcgaggaactggaagagaagaatatcaaagaattcctgcaaagcttcgtgcacatcgtgcagatgttcatcaacacttcttcaggtggcggtagtggtgggggaggatctggaggcggaggaagcgggggtggaggttcaggaggagggagcttgcaaattacctgcccccctccgatgagcgtggagcacgccgacatctgggtcaagagctacagcttgtatagtagggagcggtacatctgtaacagcgggttcaagaggaaggccgggaccagctcactgaccgagtgcgtgttgaacaaggccaccaacgtggcccactggaccacccctagccttaagtgcatcagggacccagcgctcgtacaccagagacccgcgcctccctctacggtaaccacggcaggcgtaaccccccagcccgagagcctgtccccgagcggcaaggagcctgcagcgagcagcccctcaagcaacaacacagccgctaccaccgcggcaatcgtgcccggcagccagctgatgccctcaaagagccccagcaccggcaccactgagataagcagccacgagagctcacacggcactccctcacagaccactgccaagaattgggagctgaccgcctctgccagccaccagcccccaggcgtgtatccccagggccacagcgacaccacggtcgccatcagcacatctacagtgcttttgtgcggccttagcgccgtgtcactgctggcatgctacttgaaaagtaggcaaactccccctcttgccagtgtggaaatggaggccatggaagccctgcccgtgacctggggcaccagttctagggacgaggaccttgagaactgctcacatcatttgagtggtgttggttcgctaaactgcatcgtcgctgtgtcccagaacatgggcatcggcaagaacggggacctgccctggccaccgctcaggaatgaattcagatatttccagagaatgaccacaacctcttcagtagaaggtaaacagaatctggtgattatgggtaagaagacctggttctccattcctgagaagaatcgacctttaaagggtagaattaatttagttctcagcagagaactcaaggaacctccacaaggagctcattttctttccagaagtctagatgatgccttaaaacttactgaacaaccagaattagcaaataaagtagacatggtctggatagttggtggcagttctgtttataaggaagccatgtatcacccaggccatcttaaactatttgtgacaaggatcatgcaagactttgaaagtgacacgttttttccagaaattgatttggagaaatataaacttctgccagaatacccaggtgttctctctgatgtccaggaggagaaaggcattaagtacaaatttgaagtatatgagaagaatgattga

SEQ ID NO: 887 - DNA, 1215 bp, Artificial Sequence
  Description of Artificial Sequence: Synthetic Construct
atggactggacatggatactcttcctggtagcagccgccacacgagtgcacagcaactgggtgaacgtgatctccgacctgaaaaagatcgaggatttgatccagagcatgcacattgacgccaccctgtataccgagtccgacgtgcacccgagttgcaaggtgactgccatgaagtgcttcctgctggagctgcaagtgatcagcctggagagcggcgacgccagcatccacgacaccgtggaaaaccttatcattctggccaacaatagcctgagcagcaacggcaacgtgaccgaaagcggatgtaaggaatgcgaggaactggaagagaagaatatcaaagaattcctgcaaagcttcgtgcacatcgtgcagatgttcatcaacacttcttcaggtggcggtagtggtgggggaggatctggaggcggaggaagcgggggtggaggttcaggtggaggcagcttgcaatacccatacgatgttccagattacgctattacctgcccccctccgatgagcgtggagcacgccgacatctgggtcaagagctacagcttgtatagtagggagcggtacatctgtaacagcgggttcaagaggaaggccgggaccagctcactgaccgagtgcgtgttgaacaaggccaccaacgtggcccactggaccacccctagccttaagtgcatcagggacccagcgctcgtacaccagagacccgcgcctccctctacggtaaccacggcaggcgtaaccccccagcccgagagcctgtccccgagcggcaaggagcctgcagcgagcagcccctcaagcaacaacacagccgctaccaccgcggcaatcgtgcccggcagccagctgatgccctcaaagagccccagcaccggcaccactgagataagcagccacgagagctcacacggcactccctcacagaccactgccaagaattgggagctgaccgcctctgccagccaccagcccccaggcgtgtatccccagggccacagcgacaccacggtcgccatcagcacatctacagtgcttttgtgcggccttagcgccgtgtcactgctggcatgctacttgaaaagtaggcaaactccccctcttgccagtgtggaaatggaggccatggaagccctgcccgtgacctggggcaccagttctagggacgaggaccttgagaactgctcacatcatttgtga

SEQ ID NO: 888 - DNA, 1239 bp, Artificial Sequence
  Description of Artificial Sequence: Synthetic Construct
atggactggacatggatactcttcctggtagcagccgccacacgagtgcacagcgactacaaagacgatgacgacaagaactgggtgaacgtgatctccgacctgaaaaagatcgaggatttgatccagagcatgcacattgacgccaccctgtataccgagtccgacgtgcacccgagttgcaaggtgactgccatgaagtgcttcctgctggagctgcaagtgatcagcctggagagcggcgacgccagcatccacgacaccgtggaaaaccttatcattctggccaacaatagcctgagcagcaacggcaacgtgaccgaaagcggatgtaaggaatgcgaggaactggaagagaagaatatcaaagaattcctgcaaagcttcgtgcacatcgtgcagatgttcatcaacacttcttcaggtggcggtagtggtgggggaggatctggaggcggaggaagcgggggtggaggttcaggtggaggcagcttgcaatacccatacgatgttccagattacgctattacctgcccccctccgatgagcgtggagcacgccgacatctgggtcaagagctacagcttgtatagtagggagcggtacatctgtaacagcgggttcaagaggaaggccgggaccagctcactgaccgagtgcgtgttgaacaaggccaccaacgtggcccactggaccacccctagccttaagtgcatcagggacccagcgctcgtacaccagagacccgcgcctccctctacggtaaccacggcaggcgtaaccccccagcccgagagcctgtccccgagcggcaaggagcctgcagcgagcagcccctcaagcaacaacacagccgctaccaccgcggcaatcgtgcccggcagccagctgatgccctcaaagagccccagcaccggcaccactgagataagcagccacgagagctcacacggcactccctcacagaccactgccaagaattgggagctgaccgcctctgccagccaccagcccccaggcgtgtatccccagggccacagcgacaccacggtcgccatcagcacatctacagtgcttttgtgcggccttagcgccgtgtcactgctggcatgctacttgaaaagtaggcaaactccccctcttgccagtgtggaaatggaggccatggaagccctgcccgtgacctggggcaccagttctagggacgaggaccttgagaactgctcacatcatttgtga

SEQ ID NO: 889 - DNA, 1212 bp, Artificial Sequence
  Description of Artificial Sequence: Synthetic Construct
atggactggacatggatactcttcctggtagcagccgccacacgagtgcacagcaactgggtgaacgtgatctccgacctgaaaaagatcgaggatttgatccagagcatgcacattgacgccaccctgtataccgagtccgacgtgcacccgagttgcaaggtgactgccatgaagtgcttcctgctggagctgcaagtgatcagcctggagagcggcgacgccagcatccacgacaccgtggaaaaccttatcattctggccaacaatagcctgagcagcaacggcaacgtgaccgaaagcggatgtaaggaatgcgaggaactggaagagaagaatatcaaagaattcctgcaaagcttcgtgcacatcgtgcagatgttcatcaacacttcttctggtggcgggagtggaggaggtgggtccggagggggagggagcggtggtggaggttccggcggggggggtagtggaggcggagggtcaggtgggggcagcattacctgcccccctccgatgagcgtggagcacgccgacatctgggtcaagagctacagcttgtatagtagggagcggtacatctgtaacagcgggttcaagaggaaggccgggaccagctcactgaccgagtgcgtgttgaacaaggccaccaacgtggcccactggaccacccctagccttaagtgcatcagggacccagcgctcgtacaccagagacccgcgcctccctctacggtaaccacggcaggcgtaaccccccagcccgagagcctgtccccgagcggcaaggagcctgcagcgagcagcccctcaagcaacaacacagccgctaccaccgcggcaatcgtgcccggcagccagctgatgccctcaaagagccccagcaccggcaccactgagataagcagccacgagagctcacacggcactccctcacagaccactgccaagaattgggagctgaccgcctctgccagccaccagcccccaggcgtgtatccccagggccacagcgacaccacggtcgccatcagcacatctacagtgcttttgtgcggccttagcgccgtgtcactgctggcatgctacttgaaaagtaggcaaactccccctcttgccagtgtggaaatggaggccatggaagccctgcccgtgacctggggcaccagttctagggacgaggaccttgagaactgctcacatcatttgtga

SEQ ID NO: 890 - DNA, 1212 bp, Artificial Sequence
  Description of Artificial Sequence: Synthetic Construct
atggactggacatggatactcttcctggtagcagccgccacacgagtgcacagcaactgggtgaacgtgatctccgacctgaaaaagatcgaggatttgatccagagcatgcacattgacgccaccctgtataccgagtccgacgtgcacccgagttgcaaggtgactgccatgaagtgcttcctgctggagctgcaagtgatcagcctggagagcggcgacgccagcatccacgacaccgtggaaaaccttatcattctggccaacaatagcctgagcagcaacggcaacgtgaccgaaagcggatgtaaggaatgcgaggaactggaagagaagaatatcaaagaattcctgcaaagcttcgtgcacatcgtgcagatgttcatcaacacttctagtggtggcgggtccggcggtggtggtagcgggggtggaggctcaggtggcggtggcagttatccttacgatgtgcccgactatgcttcaggcggggggagtattacctgcccccctccgatgagcgtggagcacgccgacatctgggtcaagagctacagcttgtatagtagggagcggtacatctgtaacagcgggttcaagaggaaggccgggaccagctcactgaccgagtgcgtgttgaacaaggccaccaacgtggcccactggaccacccctagccttaagtgcatcagggacccagcgctcgtacaccagagacccgcgcctccctctacggtaaccacggcaggcgtaaccccccagcccgagagcctgtccccgagcggcaaggagcctgcagcgagcagcccctcaagcaacaacacagccgctaccaccgcggcaatcgtgcccggcagccagctgatgccctcaaagagccccagcaccggcaccactgagataagcagccacgagagctcacacggcactccctcacagaccactgccaagaattgggagctgaccgcctctgccagccaccagcccccaggcgtgtatccccagggccacagcgacaccacggtcgccatcagcacatctacagtgcttttgtgcggccttagcgccgtgtcactgctggcatgctacttgaaaagtaggcaaactccccctcttgccagtgtggaaatggaggccatggaagccctgcccgtgacctggggcaccagttctagggacgaggaccttgagaactgctcacatcatttgtga

SEQ ID NO: 891 - DNA, 1116 bp, Artificial Sequence
  Description of Artificial Sequence: Synthetic Construct
atggactggacatggatactcttcctggtagcagccgccacacgagtgcacagcaactgggtgaacgtgatctccgacctgaaaaagatcgaggatttgatccagagcatgcacattgacgccaccctgtataccgagtccgacgtgcacccgagttgcaaggtgactgccatgaagtgcttcctgctggagctgcaagtgatcagcctggagagcggcgacgccagcatccacgacaccgtggaaaaccttatcattctggccaacaatagcctgagcagcaacggcaacgtgaccgaaagcggatgtaaggaatgcgaggaactggaagagaagaatatcaaagaattcctgcaaagcttcgtgcacatcgtgcagatgttcatcaacacttctagtggtattacctgcccccctccgatgagcgtggagcacgccgacatctgggtcaagagctacagcttgtatagtagggagcggtacatctgtaacagcgggttcaagaggaaggccgggaccagctcactgaccgagtgcgtgttgaacaaggccaccaacgtggcccactggaccacccctagccttaagtgcatcagggacccagcgctcgtacaccagagacccgcgcctccctctacggtaaccacggcaggcgtaaccccccagcccgagagcctgtccccgagcggcaaggagcctgcagcgagcagcccctcaagcaacaacacagccgctaccaccgcggcaatcgtgcccggcagccagctgatgccctcaaagagccccagcaccggcaccactgagataagcagccacgagagctcacacggcactccctcacagaccactgccaagaattgggagctgaccgcctctgccagccaccagcccccaggcgtgtatccccagggccacagcgacaccacggtcgccatcagcacatctacagtgcttttgtgcggccttagcgccgtgtcactgctggcatgctacttgaaaagtaggcaaactccccctcttgccagtgtggaaatggaggccatggaagccctgcccgtgacctggggcaccagttctagggacgaggaccttgagaactgctcacatcatttgtga

SEQ ID NO: 892 - DNA, 1224 bp, Artificial Sequence
  Description of Artificial Sequence: Synthetic Construct
atggccccgcggcgggcgcgcggctgccggaccctcggtctcccggcgctgctactgctgctgctgctccggccgccggcgacgcggggcaactgggtgaatgtaataagtgatttgaaaaaaattgaagatcttattcaatctatgcatattgatgctactttatatacggaaagtgatgttcaccccagttgcaaagtaacagcaatgaagtgctttctcttggagttacaagttatttcacttgagtccggagatgcaagtattcatgatacagtagaaaatctgatcatcctagcaaacaacagtttgtcttctaatgggaatgtaacagaatctggatgcaaagaatgtgaggaactggaggaaaaaaatattaaagaatttttgcagagttttgtacatattgtccaaatgttcatcaacacttcttccggtggaggtagcggtggagggggttctggtggaggaggttctggaggtggaggttctggcggtgggtccttgcaaatcacgtgccctccccccatgtccgtggaacacgcagacatctgggtcaagagctacagcttgtactccagggagcggtacatttgtaactctggtttcaagcgtaaagccggcacgtccagcctgacggagtgcgtgttgaacaaggccacgaatgtcgcccactggacaacccccagtctcaaatgcattagagaccctgccctggttcaccaaaggccagcgccaccctccacagtaacgacggcaggggtgaccccacagccagagagcctctccccttctggaaaagagcccgcagcttcatctcccagctcaaacaacacagcggccacaacagcagctattgtcccgggctcccagctgatgccttcaaaatcaccttccacaggaaccacagagataagcagtcatgagtcctcccacggcaccccctctcagacaacagccaagaactgggaactcacagcatccgcctcccaccagccgccaggtgtgtatccacagggccacagcgacaccactgtggctatctccacgtccactgtcctgctgtgtgggctgagcgctgtgtctctcctggcatgctacctcaagtcaaggcaaactcccccgctggccagcgttgaaatggaagccatggaggctctgccggtgacttgggggaccagcagcagagatgaagacttggaaaactgctctcaccacctatga

SEQ ID NO: 893 - DNA, 1194 bp, Artificial Sequence
  Description of Artificial Sequence: Synthetic Construct
atggactggacatggatactcttcctggtagcagccgccacacgagtgcacagcaactgggtgaacgtgatctccgacctgaaaaagatcgaggatttgatccagagcatgcacattgacgccaccctgtataccgagtccgacgtgcacccgagttgcaaggtgactgccatgaagtgcttcctgctggagctgcaagtgatcagcctggagagcggcgacgccagcatccacgacaccgtggaaaaccttatcattctggccaacaatagcctgagcagcaacggcaacgtgaccgaaagcggatgtaaggaatgcgaggaactggaagagaagaatatcaaagaattcctgcaaagcttcgtgcacatcgtgcagatgttcatcaacacttcttcaggtggcggtagtggtgggggaggatctggaggcggaggaagcgggggtggaggttcaggaggagggagcttgcaaattacctgcccccctccgatgagcgtggagcacgccgacatctgggtcaagagctacagcttgtatagtagggagcggtacatctgtaacagcgggttcaagaggaaggccgggaccagctcactgaccgagtgcgtgttgaacaaggccaccaacgtggcccactggaccacccctagccttaagtgcatcagggacccagcgctcgtacaccagagacccgcgcctccctctacggtaaccacggcaggcgtaaccccccagcccgagagcctgtccccgagcggcaaggagcctgcagcgagcagcccctcaagcaacaacacagccgctaccaccgcggcaatcgtgcccggcagccagctgatgccctcaaagagccccagcaccggcaccactgagataagcagccacgagagctcacacggcactccctcacagaccactgccaagaattgggagctgaccgcctctgccagccaccagcccccaggcgtgtatccccagggccacagcgacaccacggtcgccatcagcacatctacagtgcttttgtgcggccttagcgccgtgtcactgctggcatgctacttgaaaagtaggcaaactccccctcttgccagtgtggaaatggaggccatggaagccctgcccgtgacctggggcaccagttctagggacgaggaccttgagaactgctcacatcatttgggatcctga

SEQ ID NO: 894 - DNA, 1188 bp, Artificial Sequence
  Description of Artificial Sequence: Synthetic Construct
atggactggacctggattctgtttctggtggccgctgccacaagagtgcacagcaattgggtcaacgtgatcagcgacctgaagaagatcgaggacctgatccagagcatgcacatcgacgccacactgtacaccgagtccgatgtgcaccctagctgcaaagtgaccgccatgaagtgctttctgctggaactgcaagtgatcagcctggaaagcggcgacgccagcatccacgataccgtggaaaatctgatcatcctggccaacaacagcctgagcagcaacggcaatgtgaccgagagcggctgcaaagagtgcgaggaactggaagagaagaacatcaaagagttcctccagagcttcgtccacatcgtgcagatgttcatcaacaccagctctggcggaggaagcggaggcggaggatctggtggtggtggatctggcggcggtggtagtggcggaggttctctgcaaatcacctgtcctccacctatgagcgtggaacacgccgacatctgggtcaagagctacagcctgtacagcagagagcggtacatctgcaacagcggcttcaagagaaaggccggcacaagcagcctgaccgagtgtgtgctgaacaaggccacaaacgtggcccactggaccacacctagcctgaagtgcatcagagatcccgctctggttcaccagaggcctgctcctccatctacagtgacaacagctggcgtgacccctcagcctgagtctctgtctccatctggaaaagagcctgccgccagctctcccagctctaacaatactgctgccaccacagccgccatcgtgcctggatctcagctgatgcctagcaagagccctagcaccggcacaacagagatcagctctcacgagtctagccacggcaccccatctcagaccacagccaagaattgggagctgaccgcctctgcctctcatcagccacctggtgtttaccctcaaggccactctgataccaccgtggccatcagcacaagcacagtgctgctgtgtggactgtctgccgtgtctctgctggcctgctacctgaagtctagacagacacctcctctggccagcgtggaaatggaagccatggaagctctgcctgtgacatggggcaccagcagcagagatgaggacctcgagaattgcagccaccacctgtag

SEQ ID NO: 895 - DNA, 1188 bp, Artificial Sequence; identical to SEQ ID NO: 894
  Description of Artificial Sequence: Synthetic Construct

SEQ ID NO: 896 - DNA, 1668 bp, Artificial Sequence
  Description of Artificial Sequence: Synthetic Construct
atggactggacctggattctgtttctggtggccgctgccacaagagtgcacagcaattgggtcaacgtgatcagcgacctgaagaagatcgaggacctgatccagagcatgcacatcgacgccacactgtacaccgagtccgatgtgcaccctagctgcaaagtgaccgccatgaagtgctttctgctggaactgcaagtgatcagcctggaaagcggcgacgccagcatccacgataccgtggaaaatctgatcatcctggccaacaacagcctgagcagcaacggcaatgtgaccgagagcggctgcaaagagtgcgaggaactggaagagaagaacatcaaagagttcctccagagcttcgtccacatcgtgcagatgttcatcaacaccagctctggcggaggaagcggaggcggaggatctggtggtggtggatctggcggcggtggtagtggcggaggttctctgcaaatcacctgtcctccacctatgagcgtggaacacgccgacatctgggtcaagagctacagcctgtacagcagagagcggtacatctgcaacagcggcttcaagagaaaggccggcacaagcagcctgaccgagtgtgtgctgaacaaggccacaaacgtggcccactggaccacacctagcctgaagtgcatcagagatcccgctctggttcaccagaggcctgctcctccatctacagtgacaacagctggcgtgacccctcagcctgagtctctgtctccatctggaaaagagcctgccgccagctctcccagctctaacaatactgctgccaccacagccgccatcgtgcctggatctcagctgatgcctagcaagagccctagcaccggcacaacagagatcagctctcacgagtctagccacggcaccccatctcagaccacagccaagaattgggagctgaccgcctctgcctctcatcagccacctggtgtttaccctcaaggccactctgataccaccgtggccatcagcacaagcacagtgctgctgtgtggactgtctgccgtgtctctgctggcctgctacctgaagtctagacagacacctcctctggccagcgtggaaatggaagccatggaagctctgcctgtgacatggggcaccagcagcagagatgaggacctcgagaattgcagccaccacctgagcggcatctctctgattgcggcgctggcagttgactacgttattggcatggaaaacgcgatgccatggaacctcccggctgacctggcgtggttcaaacgtaacaccctgaacaaacctgtgatcatgggtcgtcacacctgggaatctattggccgtcctctcccgggtcgtaaaaacatcattctgtcttctcagccaggcaccgacgaccgtgttacctgggttaaaagcgttgacgaagcgattgctgcgtgcggtgatgttcctgaaattatggtgatcggcggtggccgtgttatcgaacagttcctgccgaaagcgcagaaactgtacctgacccacatcgacgcggaagttgaaggtgacacccacttcccggactacgaaccggatgattgggagagcgtattctccgaattccatgatgcggatgcgcaaaactctcattcttactgttttgaaatcctggaacgtcgttag

SEQ ID NO: 897 - DNA, 1224 bp, Artificial Sequence; identical to SEQ ID NO: 892
  Description of Artificial Sequence: Synthetic Construct

SEQ ID NO: 898 - DNA, 1116 bp, Artificial Sequence
  Description of Artificial Sequence: Synthetic Construct
atggactggacatggatactcttcctggtagcagccgccacacgagtgcacagcaactgggtgaacgtgatctccgacctgaaaaagatcgaggatttgatccagagcatgcacattgacgccaccctgtataccgagtccgacgtgcacccgagttgcaaggtgactgccatgaagtgcttcctgctggagctgcaagtgatcagcctggagagcggcgacgccagcatccacgacaccgtggaaaaccttatcattctggccaacaatagcctgagcagcaacggcaacgtgaccgaaagcggatgtaaggaatgcgaggaactggaagagaagaatatcaaagaattcctgcaaagcttcgtgcacatcgtgcagatgttcatcaacacttctggatccattacctgcccccctccgatgagcgtggagcacgccgacatctgggtcaagagctacagcttgtatagtagggagcggtacatctgtaacagcgggttcaagaggaaggccgggaccagctcactgaccgagtgcgtgttgaacaaggccaccaacgtggcccactggaccacccctagccttaagtgcatcagggacccagcgctcgtacaccagagacccgcgcctccctctacggtaaccacggcaggcgtaaccccccagcccgagagcctgtccccgagcggcaaggagcctgcagcgagcagcccctcaagcaacaacacagccgctaccaccgcggcaatcgtgcccggcagccagctgatgccctcaaagagccccagcaccggcaccactgagataagcagccacgagagctcacacggcactccctcacagaccactgccaagaattgggagctgaccgcctctgccagccaccagcccccaggcgtgtatccccagggccacagcgacaccacggtcgccatcagcacatctacagtgcttttgtgcggccttagcgccgtgtcactgctggcatgctacttgaaaagtaggcaaactccccctcttgccagtgtggaaatggaggccatggaagccctgcccgtgacctggggcaccagttctagggacgaggaccttgagaactgctcacatcatttgtga

SEQ ID NO: 899 - DNA, 1224 bp, Artificial Sequence
  Description of Artificial Sequence: Synthetic Construct
atggccccgcggcgggcgcgcggctgccggaccctcggtctcccggcgctgctactgctgctgctgctccggccgccggcgacgcggggcaactgggtgaatgtaataagtgatttgaaaaaaattgaagatcttattcaatctatgcatattgatgctactttatatacggaaagtgatgttcaccccagttgcaaagtaacagcaatgaagtgctttctcttggagttacaagttatttcacttgagtccggagatgcaagtattcatgatacagtagaaaatctgatcatcctagcaaacaacagtttgtcttctaatgggaatgtaacagaatctggatgcaaagaatgtgaggaactggaggaaaaaaatattaaagaatttttgcagagttttgtacatattgtccaaatgttcatcaacacttcttccggggggggtagcgggggagggggttccggcgggggagggtctggagggggaggttccggcggggggtccttgcaaatcacgtgccctccccccatgtccgtggaacacgcagacatctgggtcaagagctacagcttgtactccagggagcggtacatttgtaactctggtttcaagcgtaaagccggcacgtccagcctgacggagtgcgtgttgaacaaggccacgaatgtcgcccactggacaacccccagtctcaaatgcattagagaccctgccctggttcaccaaaggccagcgccaccctccacagtaacgacggcaggggtgaccccacagccagagagcctctccccttctggaaaagagcccgcagcttcatctcccagctcaaacaacacagcggccacaacagcagctattgtcccgggctcccagctgatgccttcaaaatcaccttccacaggaaccacagagataagcagtcatgagtcctcccacggcaccccctctcagacaacagccaagaactgggaactcacagcatccgcctcccaccagccgccaggtgtgtatccacagggccacagcgacaccactgtggctatctccacgtccactgtcctgctgtgtgggctgagcgctgtgtctctcctggcatgctacctcaagtcaaggcaaactcccccgctggccagcgttgaaatggaagccatggaggctctgccggtgacttgggggaccagcagcagagatgaagacttggaaaactgctctcaccacctatga

SEQ ID NO: 900 - DNA, 1722 bp, Artificial Sequence
  Description of Artificial Sequence: Synthetic Construct
atggactggacatggatactcttcctggtagcagccgccacacgagtgcacagcgactacaaagacgatgacgacaagaactgggtgaacgtgatctccgacctgaaaaagatcgaggatttgatccagagcatgcacattgacgccaccctgtataccgagtccgacgtgcacccgagttgcaaggtgactgccatgaagtgcttcctgctggagctgcaagtgatcagcctggagagcggcgacgccagcatccacgacaccgtggaaaaccttatcattctggccaacaatagcctgagcagcaacggcaacgtgaccgaaagcggatgtaaggaatgcgaggaactggaagagaagaatatcaaagaattcctgcaaagcttcgtgcacatcgtgcagatgttcatcaacacttcttcaggtggcggtagtggtgggggaggatctggaggcggaggaagcgggggtggaggttcaggtggaggcagcttgcaatacccatacgatgttccagattacgctattacctgcccccctccgatgagcgtggagcacgccgacatctgggtcaagagctacagcttgtatagtagggagcggtacatctgtaacagcgggttcaagaggaaggccgggaccagctcactgaccgagtgcgtgttgaacaaggccaccaacgtggcccactggaccacccctagccttaagtgcatcagggacccagcgctcgtacaccagagacccgcgcctccctctacggtaaccacggcaggcgtaaccccccagcccgagagcctgtccccgagcggcaaggagcctgcagcgagcagcccctcaagcaacaacacagccgctaccaccgcggcaatcgtgcccggcagccagctgatgccctcaaagagccccagcaccggcaccactgagataagcagccacgagagctcacacggcactccctcacagaccactgccaagaattgggagctgaccgcctctgccagccaccagcccccaggcgtgtatccccagggccacagcgacaccacggtcgccatcagcacatctacagtgcttttgtgcggccttagcgccgtgtcactgctggcatgctacttgaaaagtaggcaaactccccctcttgccagtgtggaaatggaggccatggaagccctgcccgtgacctggggcaccagttctagggacgaggaccttgagaactgctcacatcatttgggatccggaatctctctgattgcggcgctggcagttgactacgttattggcatggaaaacgcgatgccatggaacctcccggctgacctggcgtggttcaaacgtaacaccctgaacaaacctgtgatcatgggtcgtcacacctgggaatctattggccgtcctctcccgggtcgtaaaaacatcattctgtcttctcagccaggcaccgacgaccgtgttacctgggttaaaagcgttgacgaagcgattgctgcgtgcggtgatgttcctgaaattatggtgatcggcggtggccgtgttatcgaacagttcctgccgaaagcgcagaaactgtacctgacccacatcgacgcggaagttgaaggtgacacccacttcccggactacgaaccggatgattgggagagcgtattctccgaattccatgatgcggatgcgcaaaactctcattcttactgttttgaaatcctggaacgtcgttga

SEQ ID NO: 901 - DNA, 1245 bp, Artificial Sequence
  Description of Artificial Sequence: Synthetic Construct
atggactggacatggatactcttcctggtagcagccgccacacgagtgcacagcgactacaaagacgatgacgacaagaactgggtgaacgtgatctccgacctgaaaaagatcgaggatttgatccagagcatgcacattgacgccaccctgtataccgagtccgacgtgcacccgagttgcaaggtgactgccatgaagtgcttcctgctggagctgcaagtgatcagcctggagagcggcgacgccagcatccacgacaccgtggaaaaccttatcattctggccaacaatagcctgagcagcaacggcaacgtgaccgaaagcggatgtaaggaatgcgaggaactggaagagaagaatatcaaagaattcctgcaaagcttcgtgcacatcgtgcagatgttcatcaacacttcttcaggtggcggtagtggtgggggaggatctggaggcggaggaagcgggggtggaggttcaggtggaggcagcttgcaatacccatacgatgttccagattacgctattacctgcccccctccgatgagcgtggagcacgccgacatctgggtcaagagctacagcttgtatagtagggagcggtacatctgtaacagcgggttcaagaggaaggccgggaccagctcactgaccgagtgcgtgttgaacaaggccaccaacgtggcccactggaccacccctagccttaagtgcatcagggacccagcgctcgtacaccagagacccgcgcctccctctacggtaaccacggcaggcgtaaccccccagcccgagagcctgtccccgagcggcaaggagcctgcagcgagcagcccctcaagcaacaacacagccgctaccaccgcggcaatcgtgcccggcagccagctgatgccctcaaagagccccagcaccggcaccactgagataagcagccacgagagctcacacggcactccctcacagaccactgccaagaattgggagctgaccgcctctgccagccaccagcccccaggcgtgtatccccagggccacagcgacaccacggtcgccatcagcacatctacagtgcttttgtgcggccttagcgccgtgtcactgctggcatgctacttgaaaagtaggcaaactccccctcttgccagtgtggaaatggaggccatggaagccctgcccgtgacctggggcaccagttctagggacgaggaccttgagaactgctcacatcatttgggatcctga

SEQ ID NO: 902 - DNA, 1806 bp, Artificial Sequence
  Description of Artificial Sequence: Synthetic Construct
atggactggacatggatactcttcctggtagcagccgccacacgagtgcacagcgactacaaagacgatgacgacaagaactgggtgaacgtgatctccgacctgaaaaagatcgaggatttgatccagagcatgcacattgacgccaccctgtataccgagtccgacgtgcacccgagttgcaaggtgactgccatgaagtgcttcctgctggagctgcaagtgatcagcctggagagcggcgacgccagcatccacgacaccgtggaaaaccttatcattctggccaacaatagcctgagcagcaacggcaacgtgaccgaaagcggatgtaaggaatgcgaggaactggaagagaagaatatcaaagaattcctgcaaagcttcgtgcacatcgtgcagatgttcatcaacacttcttcaggtggcggtagtggtgggggaggatctggaggcggaggaagcgggggtggaggttcaggtggaggcagcttgcaatacccatacgatgttccagattacgctattacctgcccccctccgatgagcgtggagcacgccgacatctgggtcaagagctacagcttgtatagtagggagcggtacatctgtaacagcgggttcaagaggaaggccgggaccagctcactgaccgagtgcgtgttgaacaaggccaccaacgtggcccactggaccacccctagccttaagtgcatcagggacccagcgctcgtacaccagagacccgcgcctccctctacggtaaccacggcaggcgtaaccccccagcccgagagcctgtccccgagcggcaaggagcctgcagcgagcagcccctcaagcaacaacacagccgctaccaccgcggcaatcgtgcccggcagccagctgatgccctcaaagagccccagcaccggcaccactgagataagcagccacgagagctcacacggcactccctcacagaccactgccaagaattgggagctgaccgcctctgccagccaccagcccccaggcgtgtatccccagggccacagcgacaccacggtcgccatcagcacatctacagtgcttttgtgcggccttagcgccgtgtcactgctggcatgctacttgaaaagtaggcaaactccccctcttgccagtgtggaaatggaggccatggaagccctgcccgtgacctggggcaccagttctagggacgaggaccttgagaactgctcacatcatttgggatccggtgttggttcgctaaactgcatcgtcgctgtgtcccagaacatgggcatcggcaagaacggggacctgccctggccaccgctcaggaatgaattcagatatttccagagaatgaccacaacctcttcagtagaaggtaaacagaatctggtgattatgggtaagaagacctggttctccattcctgagaagaatcgacctttaaagggtagaattaatttagttctcagcagagaactcaaggaacctccacaaggagctcattttctttccagaagtctagatgatgccttaaaacttactgaacaaccagaattagcaaataaagtagacatggtctggatagttggtggcagttctgtttataaggaagccatgaatcacccaggccatcttaaactatttgtgacaaggatcatgcaagactttgaaagtgacacgttttttccagaaattgatttggagaaatataaacttctgccagaatacccaggtgttctctctgatgtccaggaggagaaaggcattaagtacaaatttgaagtatatgaggagaatgattga

SEQ ID NO: 903 - DNA, 1806 bp, Artificial Sequence
  Description of Artificial Sequence: Synthetic Construct
atggactggacatggatactcttcctggtagcagccgccacacgagtgcacagcgactacaaagacgatgacgacaagaactgggtgaacgtgatctccgacctgaaaaagatcgaggatttgatccagagcatgcacattgacgccaccctgtataccgagtccgacgtgcacccgagttgcaaggtgactgccatgaagtgcttcctgctggagctgcaagtgatcagcctggagagcggcgacgccagcatccacgacaccgtggaaaaccttatcattctggccaacaatagcctgagcagcaacggcaacgtgaccgaaagcggatgtaaggaatgcgaggaactggaagagaagaatatcaaagaattcctgcaaagcttcgtgcacatcgtgcagatgttcatcaacacttcttcaggtggcggtagtggtgggggaggatctggaggcggaggaagcgggggtggaggttcaggtggaggcagcttgcaatacccatacgatgttccagattacgctattacctgcccccctccgatgagcgtggagcacgccgacatctgggtcaagagctacagcttgtatagtagggagcggtacatctgtaacagcgggttcaagaggaaggccgggaccagctcactgaccgagtgcgtgttgaacaaggccaccaacgtggcccactggaccacccctagccttaagtgcatcagggacccagcgctcgtacaccagagacccgcgcctccctctacggtaaccacggcaggcgtaaccccccagcccgagagcctgtccccgagcggcaaggagcctgcagcgagcagcccctcaagcaacaacacagccgctaccaccgcggcaatcgtgcccggcagccagctgatgccctcaaagagccccagcaccggcaccactgagataagcagccacgagagctcacacggcactccctcacagaccactgccaagaattgggagctgaccgcctctgccagccaccagcccccaggcgtgtatccccagggccacagcgacaccacggtcgccatcagcacatctacagtgcttttgtgcggccttagcgccgtgtcactgctggcatgctacttgaaaagtaggcaaactccccctcttgccagtgtggaaatggaggccatggaagccctgcccgtgacctggggcaccagttctagggacgaggaccttgagaactgctcacatcatttgggatccggtgttggttcgctaaactgcatcgtcgctgtgtcccagaacatgggcatcggcaagaacggggacctgccctggccaccgctcaggaatgaattcagatatttccagagaatgaccacaacctcttcagtagaaggtaaacagaatctggtgattatgggtaagaagacctggttctccattcctgagaagaatcgacctttaaagggtagaattaatttagttctcagcagagaactcaaggaacctccacaaggagctcattttctttccagaagtctagatgatgccttaaaacttactgaacaaccagaattagcaaataaagtagacatggtctggatagttggtggcagttctgtttataaggaagccatgaatcacccaggccatcttaaactatttgtgacaaggatcatgcaagactttgaaagtgacacgttttttccagaaattgatttggagaaatataaacttctgccaggatacccaggtgttctctctgatgtccaggaggagaaaggctttaagtacaaatttgaagtatatgagaagaatgattga

SEQ ID NO: 904 - DNA, 1806 bp, Artificial Sequence
  Description of Artificial Sequence: Synthetic Construct
atggactggacatggatactcttcctggtagcagccgccacacgagtgcacagcgactacaaagacgatgacgacaagaactgggtgaacgtgatctccgacctgaaaaagatcgaggatttgatccagagcatgcacattgacgccaccctgtataccgagtccgacgtgcacccgagttgcaaggtgactgccatgaagtgcttcctgctggagctgcaagtgatcagcctggagagcggcgacgccagcatccacgacaccgtggaaaaccttatcattctggccaacaatagcctgagcagcaacggcaacgtgaccgaaagcggatgtaaggaatgcgaggaactggaagagaagaatatcaaagaattcctgcaaagcttcgtgcacatcgtgcagatgttcatcaacacttcttcaggtggcggtagtggtgggggaggatctggaggcggaggaagcgggggtggaggttcaggtggaggcagcttgcaatacccatacgatgttccagattacgctattacctgcccccctccgatgagcgtggagcacgccgacatctgggtcaagagctacagcttgtatagtagggagcggtacatctgtaacagcgggttcaagaggaaggccgggaccagctcactgaccgagtgcgtgttgaacaaggccaccaacgtggcccactggaccacccctagccttaagtgcatcagggacccagcgctcgtacaccagagacccgcgcctccctctacggtaaccacggcaggcgtaaccccccagcccgagagcctgtccccgagcggcaaggagcctgcagcgagcagcccctcaagcaacaacacagccgctaccaccgcggcaatcgtgcccggcagccagctgatgccctcaaagagccccagcaccggcaccactgagataagcagccacgagagctcacacggcactccctcacagaccactgccaagaattgggagctgaccgcctctgccagccaccagcccccaggcgtgtatccccagggccacagcgacaccacggtcgccatcagcacatctacagtgcttttgtgcggccttagcgccgtgtcactgctggcatgctacttgaaaagtaggcaaactccccctcttgccagtgtggaaatggaggccatggaagccctgcccgtgacctggggcaccagttctagggacgaggaccttgagaactgctcacatcatttgggatccggtgttggttcgctaaactgcatcgtcgctgtgtcccagaacatgggcatcggcaagaacggggacctgccctggccaccgctcaggaatgaattcagatatttccagagaatgaccacaacctcttcagtagaaggtaaacagaatctggtgattatgggtaagaagacctggttctccattcctgagaagaatcgacctttaaagggtagaattaatttagttctcagcagagaactcaaggaacctccacaaggagctcattttctttccagaagtctagatgatgccttaaaacttactgaacaaccagaattagcaaataaagtagacatggtctggatagttggtggcagttctgtttataaggaagccatgaatcacccaggcagacttaaactatttgtgacaaggatcatgcaagactttggaagtgacacgttttttccagaaattgatttggagaaatataaacttctgccagaatacccaggtgttctctctgatgtccaggaggagaaaggcattaagtacaaatttgaagtatatgagaagaatgattga

SEQ ID NO: 905 - DNA, 1806 bp, Artificial Sequence
  Description of Artificial Sequence: Synthetic Construct
atggactggacatggatactcttcctggtagcagccgccacacgagtgcacagcgactacaaagacgatgacgacaagaactgggtgaacgtgatctccgacctgaaaaagatcgaggatttgatccagagcatgcacattgacgccaccctgtataccgagtccgacgtgcacccgagttgcaaggtgactgccatgaagtgcttcctgctggagctgcaagtgatcagcctggagagcggcgacgccagcatccacgacaccgtggaaaaccttatcattctggccaacaatagcctgagcagcaacggcaacgtgaccgaaagcggatgtaaggaatgcgaggaactggaagagaagaatatcaaagaattcctgcaaagcttcgtgcacatcgtgcagatgttcatcaacacttcttcaggtggcggtagtggtgggggaggatctggaggcggaggaagcgggggtggaggttcaggtggaggcagcttgcaatacccatacgatgttccagattacgctattacctgcccccctccgatgagcgtggagcacgccgacatctgggtcaagagctacagcttgtatagtagggagcggtacatctgtaacagcgggttcaagaggaaggccgggaccagctcactgaccgagtgcgtgttgaacaaggccaccaacgtggcccactggaccacccctagccttaagtgcatcagggacccagcgctcgtacaccagagacccgcgcctccctctacggtaaccacggcaggcgtaaccccccagcccgagagcctgtccccgagcggcaaggagcctgcagcgagcagcccctcaagcaacaacacagccgctaccaccgcggcaatcgtgcccggcagccagctgatgccctcaaagagccccagcaccggcaccactgagataagcagccacgagagctcacacggcactccctcacagaccactgccaagaattgggagctgaccgcctctgccagccaccagcccccaggcgtgtatccccagggccacagcgacaccacggtcgccatcagcacatctacagtgcttttgtgcggccttagcgccgtgtcactgctggcatgctacttgaaaagtaggcaaactccccctcttgccagtgtggaaatggaggccatggaagccctgcccgtgacctggggcaccagttctagggacgaggaccttgagaactgctcacatcatttgggatccggtgttggttcgctaaactgcatcgtcgctgtgtcccagaacatgggcgtcggcaagaacggggacctgccctggccaccgctcaggaatgaattcagatatttccagagaatgaccacaacctcttcagtagaaggtaaacagaatctggtgattatgggtaagaagacctggttctccattcctgagaagaatcgacctttaaagggtagaattaatttagttctcagcagagaactcaaggaacctccacaaggagctcattttctttccagaagtctagatgatgccttaaaacttactgaacaaccagaattagcaaataaagtagacatggtctggatagttggtggcagttctgtttataaggaagccatgaatcacccaggccatcttaaactatttgtgacaaggatcatgcaagactttgaaagtgacacgttttttccagaaattgatttggagaaatataaacttctgccagaatacccaggtgttctctctgatgtccaggaggagaaaggcattaagtacaaatttgaagtatatgagaagaatgattga

SEQ ID NO: 906 - DNA, 1806 bp, Artificial Sequence
  Description of Artificial Sequence: Synthetic Construct
atggactggacatggatactcttcctggtagcagccgccacacgagtgcacagcgactacaaagacgatgacgacaagaactgggtgaacgtgatctccgacctgaaaaagatcgaggatttgatccagagcatgcacattgacgccaccctgtataccgagtccgacgtgcacccgagttgcaaggtgactgccatgaagtgcttcctgctggagctgcaagtgatcagcctggagagcggcgacgccagcatccacgacaccgtggaaaaccttatcattctggccaacaatagcctgagcagcaacggcaacgtgaccgaaagcggatgtaaggaatgcgaggaactggaagagaagaatatcaaagaattcctgcaaagcttcgtgcacatcgtgcagatgttcatcaacacttcttcaggtggcggtagtggtgggggaggatctggaggcggaggaagcgggggtggaggttcaggtggaggcagcttgcaatacccatacgatgttccagattacgctattacctgcccccctccgatgagcgtggagcacgccgacatctgggtcaagagctacagcttgtatagtagggagcggtacatctgtaacagcgggttcaagaggaaggccgggaccagctcactgaccgagtgcgtgttgaacaaggccaccaacgtggcccactggaccacccctagccttaagtgcatcagggacccagcgctcgtacaccagagacccgcgcctccctctacggtaaccacggcaggcgtaaccccccagcccgagagcctgtccccgagcggcaaggagcctgcagcgagcagcccctcaagcaacaacacagccgctaccaccgcggcaatcgtgcccggcagccagctgatgccctcaaagagccccagcaccggcaccactgagataagcagccacgagagctcacacggcactccctcacagaccactgccaagaattgggagctgaccgcctctgccagccaccagcccccaggcgtgtatccccagggccacagcgacaccacggtcgccatcagcacatctacagtgcttttgtgcggccttagcgccgtgtcactgctggcatgctacttgaaaagtaggcaaactccccctcttgccagtgtggaaatggaggccatggaagccctgcccgtgacctggggcaccagttctagggacgaggaccttgagaactgctcacatcatttgggatccggtgttggttcgctaaactgcatcgtcgctgtgtcccagaacatgggcatcggcaagaacggggacctgccctggccaccgctcaggaatgaattcagatatttccagagaatgaccacaacctcttcagtagaaggtaaacagaatctggtgattatgggtaagaagacctggttctccattcctgagaagaatcgacctttaaagggtagaattaatttagttctcagcagagaactcaaggaacctccacaaggagctcattttctttccagaagtctagatgatgccttaaaacttactgaacaaccagaattagcaaataaagtagacatggtctggatagttggtggcagttctgtttataaggaagccatgtatcacccaggccatcttaaactatttgtgacaaggatcatgcaagactttgaaagtgacacgttttttccagaaattgatttggagaaatataaacttctgccagaatacccaggtgttctctctgatgtccaggaggagaaaggcattaagtacaaatttgaagtatatgagaagaatgattga

SEQ ID NO: 907 - DNA, 1806 bp, Artificial Sequence
  Description of Artificial Sequence: Synthetic Construct
atggactggacatggatactcttcctggtagcagccgccacacgagtgcacagcgactacaaagacgatgacgacaagaactgggtgaacgtgatctccgacctgaaaaagatcgaggatttgatccagagcatgcacattgacgccaccctgtataccgagtccgacgtgcacccgagttgcaaggtgactgccatgaagtgcttcctgctggagctgcaagtgatcagcctggagagcggcgacgccagcatccacgacaccgtggaaaaccttatcattctggccaacaatagcctgagcagcaacggcaacgtgaccgaaagcggatgtaaggaatgcgaggaactggaagagaagaatatcaaagaattcctgcaaagcttcgtgcacatcgtgcagatgttcatcaacacttcttcaggtggcggtagtggtgggggaggatctggaggcggaggaagcgggggtggaggttcaggtggaggcagcttgcaatacccatacgatgttccagattacgctattacctgcccccctccgatgagcgtggagcacgccgacatctgggtcaagagctacagcttgtatagtagggagcggtacatctgtaacagcgggttcaagaggaaggccgggaccagctcactgaccgagtgcgtgttgaacaaggccaccaacgtggcccactggaccacccctagccttaagtgcatcagggacccagcgctcgtacaccagagacccgcgcctccctctacggtaaccacggcaggcgtaaccccccagcccgagagcctgtccccgagcggcaaggagcctgcagcgagcagcccctcaagcaacaacacagccgctaccaccgcggcaatcgtgcccggcagccagctgatgccctcaaagagccccagcaccggcaccactgagataagcagccacgagagctcacacggcactccctcacagaccactgccaagaattgggagctgaccgcctctgccagccaccagcccccaggcgtgtatccccagggccacagcgacaccacggtcgccatcagcacatctacagtgcttttgtgcggccttagcgccgtgtcactgctggcatgctacttgaaaagtaggcaaactccccctcttgccagtgtggaaatggaggccatggaagccctgcccgtgacctggggcaccagttctagggacgaggaccttgagaactgctcacatcatttgggatccggtgttggttcgctaaactgcatcgtcgctgtgtcccagaacatgggcgtcggcaagaacggggacctgccctggccaccgctcaggaatgaattcagatatttccagagaatgaccacaacctcttcagtagaaggtaaacagaatctggtgattatgggtaagaagacctggttctccattcctgagaagaatcgacctttaaagggtagaattaatttagttctcagcagagaactcaaggaacctccacaaggagctcattttctttccagaagtctagatgatgccttaaaacttactgaacaaccagaattagcaaataaagtagacatggtctggatagttggtggcagttctgttattaaggaagccatgaatcacccaggccatcttaaactatttgtgacaaggatcatgcaagactttgaaagtgacacgttttttccagaaattgatttggagaaatataaacttctgccagaatacccaggtgttctctctgatgtccaggaggagaaaggcattaagtacaaatttgaagtatatgagaagaatgattga

SEQ ID NO: 908 - DNA, 2046 bp, Artificial Sequence
  Description of Artificial Sequence: Synthetic Construct
atggattggacctggattctgtttctggtggccgctgccacaagagtgcacagcaactgggtgaatgtgatcagcgacctgaagaagatcgaggatctgatccagagcatgcacattgatgccaccctgtacacagaatctgatgtgcaccctagctgtaaagtgaccgccatgaagtgttttctgctggagctgcaggtgatttctctggaaagcggagatgcctctatccacgacacagtggagaatctgatcatcctggccaacaatagcctgagcagcaatggcaatgtgacagagtctggctgtaaggagtgtgaggagctggaggagaagaacatcaaggagtttctgcagagctttgtgcacatcgtgcagatgttcatcaatacaagctctggcggaggatctggaggaggcggatctggaggaggaggcagtggaggcggaggatctggcggaggatctctgcagattacatgccctcctccaatgtctgtggagcacgccgatatttgggtgaagtcctacagcctgtacagcagagagagatacatctgcaacagcggctttaagagaaaggccggcacctcttctctgacagagtgcgtgctgaataaggccacaaatgtggcccactggacaacacctagcctgaagtgcattagagatcctgccctggtccaccagaggcctgcccctccatctacagtgacaacagccggagtgacacctcagcctgaatctctgagcccttctggaaaagaacctgccgccagctctcctagctctaataataccgccgccacaacagccgccattgtgcctggatctcagctgatgcctagcaagtctcctagcacaggcacaacagagatcagcagccacgaatcttctcacggaacaccttctcagaccaccgccaagaattgggagctgacagcctctgcctctcaccagcctccaggagtgtatcctcagggccactctgatacaacagtggccatcagcacatctacagtgctgctgtgtggactgtctgccgtgtctctgctggcctgttacctgaagtctagacagacacctcctctggcctctgtggagatggaggccatggaagccctgcctgtgacatggggaacaagcagcagagatgaggacctggagaattgttctcaccacctgtcgcgaatggactacaaggacgatgacgacaaggattataaagatgatgatgataaagattataaagacgacgatgataagtcgcgaggatccggagctactaacttcagcctgctgaagcaggctggagacgtggaggagaaccctggacctttgagcaagggcgaggaggacaacatggccatcatcaaggagttcatgcgcttcaaggtgcacatggagggctccgtgaacggccacgagttcgagatcgagggcgagggcgagggccgcccctacgagggcacccagaccgccaagctgaaggtgaccaagggcggccccctgcccttcgcctgggacatcctgtcccctcagttcatgtacggctccaaggcctacgtgaagcaccccgccgacatccccgactacttgaagctgtccttccccgagggcttcaagtgggagcgcgtgatgaacttcgaggacggcggcgtggtgaccgtgacccaggactcctccctgcaggacggcgagttcatctacaaggtgaagctgcgcggcaccaacttcccctccgacggccccgtaatgcagaagaagaccatgggctgggaggcctcctccgagcggatgtaccccgaggacggcgccctgaagggcgagatcaagcagaggctgaagctgaaggacggcggccactacgacgccgaggtcaagaccacctacaaggccaagaagcccgtgcagctgcccggcgcctacaacgtcaacatcaagctggacatcacctcccacaacgaggactacaccatcgtggaacagtacgagcgcgccgagggccgccactccaccggcggcatggacgagctgtacaagtaa

SEQ ID NO: 909 - DNA, 1959 bp, Artificial Sequence
  Description of Artificial Sequence: Synthetic Construct
atggattggacctggattctgtttctggtggccgctgccacaagagtgcacagcaactgggtgaatgtgatcagcgacctgaagaagatcgaggatctgatccagagcatgcacattgatgccaccctgtacacagaatctgatgtgcaccctagctgtaaagtgaccgccatgaagtgttttctgctggagctgcaggtgatttctctggaaagcggagatgcctctatccacgacacagtggagaatctgatcatcctggccaacaatagcctgagcagcaatggcaatgtgacagagtctggctgtaaggagtgtgaggagctggaggagaagaacatcaaggagtttctgcagagctttgtgcacatcgtgcagatgttcatcaatacaagctctggcggaggatctggaggaggcggatctggaggaggaggcagtggaggcggaggatctggcggaggatctctgcagattacatgccctcctccaatgtctgtggagcacgccgatatttgggtgaagtcctacagcctgtacagcagagagagatacatctgcaacagcggctttaagagaaaggccggcacctcttctctgacagagtgcgtgctgaataaggccacaaatgtggcccactggacaacacctagcctgaagtgcattagagatcctgccctggtccaccagaggcctgcccctccatctacagtgacaacagccggagtgacacctcagcctgaatctctgagcccttctggaaaagaacctgccgccagctctcctagctctaataataccgccgccacaacagccgccattgtgcctggatctcagctgatgcctagcaagtctcctagcacaggcacaacagagatcagcagccacgaatcttctcacggaacaccttctcagaccaccgccaagaattgggagctgacagcctctgcctctcaccagcctccaggagtgtatcctcagggccactctgatacaacagtggccatcagcacatctacagtgctgctgtgtggactgtctgccgtgtctctgctggcctgttacctgaagtctagacagacacctcctctggcctctgtggagatggaggccatggaagccctgcctgtgacatggggaacaagcagcagagatgaggacctggagaattgttctcaccacctgggatccggagctactaacttcagcctgctgaagcaggctggagacgtggaggagaaccctggacctttgagcaagggcgaggaggacaacatggccatcatcaaggagttcatgcgcttcaaggtgcacatggagggctccgtgaacggccacgagttcgagatcgagggcgagggcgagggccgcccctacgagggcacccagaccgccaagctgaaggtgaccaagggcggccccctgcccttcgcctgggacatcctgtcccctcagttcatgtacggctccaaggcctacgtgaagcaccccgccgacatccccgactacttgaagctgtccttccccgagggcttcaagtgggagcgcgtgatgaacttcgaggacggcggcgtggtgaccgtgacccaggactcctccctgcaggacggcgagttcatctacaaggtgaagctgcgcggcaccaacttcccctccgacggccccgtaatgcagaagaagaccatgggctgggaggcctcctccgagcggatgtaccccgaggacggcgccctgaagggcgagatcaagcagaggctgaagctgaaggacggcggccactacgacgccgaggtcaagaccacctacaaggccaagaagcccgtgcagctgcccggcgcctacaacgtcaacatcaagctggacatcacctcccacaacgaggactacaccatcgtggaacagtacgagcgcgccgagggccgccactccaccggcggcatggacgagctgtacaagtaa

SEQ ID NO: 910 - DNA, 804 bp, Artificial Sequence
  Description of Artificial Sequence: Synthetic Construct
atggccccgcggcgggcgcgcggctgccggaccctcggtctcccggcgctgctactgctgctgctgctccggccgccggcgacgcggggcattacctgcccccctccgatgagcgtggagcacgccgacatctgggtcaagagctacagcttgtatagtagggagcggtacatctgtaacagcgggttcaagaggaaggccgggaccagctcactgaccgagtgcgtgttgaacaaggccaccaacgtggcccactggaccacccctagccttaagtgcatcagggacccagcgctcgtacaccagagacccgcgcctccctctacggtaaccacggcaggcgtaaccccccagcccgagagcctgtccccgagcggcaaggagcctgcagcgagcagcccctcaagcaacaacacagccgctaccaccgcggcaatcgtgcccggcagccagctgatgccctcaaagagccccagcaccggcaccactgagataagcagccacgagagctcacacggcactccctcacagaccactgccaagaattgggagctgaccgcctctgccagccaccagcccccaggcgtgtatccccagggccacagcgacaccacggtcgccatcagcacatctacagtgcttttgtgcggccttagcgccgtgtcactgctggcatgctacttgaaaagtaggcaaactccccctcttgccagtgtggaaatggaggccatggaagccctgcccgtgacctggggcaccagttctagggacgaggaccttgagaactgctcacatcatttgtga

SEQ ID NO: 911 - DNA, 1209 bp, Artificial Sequence
  Description of Artificial Sequence: Synthetic Construct
atggactggacatggatactcttcctggtagcagccgccacacgagtgcacagcaactgggtgaacgtgatctccgacctgaaaaagatcgaggatttgatccagagcatgcacattgacgccaccctgtataccgagtccgacgtgcacccgagttgcaaggtgactgccatgaagtgcttcctgctggagctgcaagtgatcagcctggagagcggcgacgccagcatccacgacaccgtggaaaaccttatcattctggccaacaatagcctgagcagcaacggcaacgtgaccgaaagcggatgtaaggaatgcgaggaactggaagagaagaatatcaaagaattcctgcaaagcttcgtgcacatcgtgcagatgttcatcaacacttcttcaggtggcggtagtggtgggggaggatctggaggcggaggaagcgggggtggaggttcaggaggagggagcttgcaaattacctgcccccctccgatgagcgtggagcacgccgacatctgggtcaagagctacagcttgtatagtagggagcggtacatctgtaacagcgggttcaagaggaaggccgggaccagctcactgaccgagtgcgtgttgaacaaggccaccaacgtggcccactggaccacccctagccttaagtgcatcagggacccagcgctcgtacaccagagacccgcgcctccctctacggtaaccacggcaggcgtaaccccccagcccgagagcctgtccccgagcggcaaggagcctgcagcgagcagcccctcaagcaacaacacagccgctaccaccgcggcaatcgtgcccggcagccagctgatgccctcaaagagccccagcaccggcaccactgagataagcagccacgagagctcacacggcactccctcacagaccactgccaagaattgggagctgaccgcctctgccagccaccagcccccaggcgtgtatccccagggccacagcgacaccacgaccacaaccccagcacctcgcccaccaacaccagcaccaaccatcgcatcccagccactgtctctgaggcccgaggcatgtaggcctgcagcaggaggcgccgtgcacaccaggggcctggactttgcctgcgatatctatatctgggcaccactggcaggaacatgtggcgtgctgctgctgtccctggtcatcaccctgtattgctga

SEQ ID NO: 912 - protein, 320 aa, Artificial Sequence
  Description of Artificial Sequence: Synthetic Construct
MDWTWILFLVAAATRVHSNWVNVISDLKKIEDLIQSMHIDATLYTESDVHPSCKVTAMKCFLLELQVISLESGDASIHDTVENLIILANNSLSSNGNVTESGCKECEELEEKNIKEFLQSFVHIVQMFINTSGSVGSLNCIVAVSQNMGIGKNGDLPWPPLRNEFRYFQRMTTTSSVEGKQNLVIMGKKTWFSIPEKNRPLKGRINLVLSRELKEPPQGAHFLSRSLDDALKLTEQPELANKVDMVWIVGGSSVIKEAMNHPGHLKLFVTRIMQDFESDTFFPEIDLEKYKLLPEYPGVLSDVQEEKGIKYKFEVYEKND

SEQ ID NO: 913 - protein, 320 aa, Artificial Sequence; identical to SEQ ID NO: 912
  Description of Artificial Sequence: Synthetic Construct

SEQ ID NO: 914 - protein, 235 aa, Artificial Sequence; identical to SEQ ID NO: 857
  Description of Artificial Sequence: Synthetic Construct

SEQ ID NO: 915 - protein, 134 aa, Artificial Sequence
  Description of Artificial Sequence: Synthetic Construct
MDWTWILFLVAAATRVHSNWVNVISDLKKIEDLIQSMHIDATLYTESDVHPSCKVTAMKCFLLELQVISLESGDASIHDTVENLIILANNSLSSNGNVTESGCKECEELEEKNIKEFLQSFVHIVQMFINTSGS

SEQ ID NO: 916 - protein, 134 aa, Artificial Sequence; identical to SEQ ID NO: 915
  Description of Artificial Sequence: Synthetic Construct

SEQ ID NO: 917 - protein, 235 aa, Artificial Sequence; identical to SEQ ID NO: 857
  Description of Artificial Sequence: Synthetic Construct

SEQ ID NO: 918 - DNA, 2291 bp, Artificial Sequence
  Description of Artificial Sequence: Synthetic Construct
atggactggacatggatactcttcctggtagcagccgccacacgagtgcacagcaactgggtgaatgtaataagtgatttgaaaaaaattgaagatcttattcaatctatgcatattgatgctactttatatacggaaagtgatgttcaccccagttgcaaagtaacagcaatgaagtgctttctcttggagttacaagttatttcacttgagtccggagatgcaagtattcatgatacagtagaaaatctgatcatcctagcaaacaacagtttgtcttctaatgggaatgtaacagaatctggatgcaaagaatgtgaggaactggaggaaaaaaatattaaagaatttttgcagagttttgtacatattgtccaaatgttcatcaacacttctggttccgttggttcgctaaactgcatcgtcgctgtgtcccagaacatgggcatcggcaagaacggggacctgccctggccaccgctcaggaatgaattcagatatttccagagaatgaccacaacctcttcagtagaaggtaaacagaatctggtgattatgggtaagaagacctggttctccattcctgagaagaatcgacctttaaagggtagaattaatttagttctcagcagagaactcaaggaacctccacaaggagctcattttctttccagaagtctagatgatgccttaaaacttactgaacaaccagaattagcaaataaagtagacatggtctggatagttggtggcagttctgttattaaggaagccatgaatcacccaggccatcttaaactatttgtgacaaggatcatgcaagactttgaaagtgacacgttttttccagaaattgatttggagaaatataaacttctgccagaatacccaggtgttctctctgatgtccaggaggagaaaggcattaagtacaaatttgaagtatatgagaagaatgattgatctagataatacgactcactagagatcccgcccctctccctcccccccccctaacgttactggccgaagccgcttggaataaggccggtgtgcgtttgtctatatgttattttccaccatattgccgtcttttggcaatgtgagggcccggaaacctggccctgtcttcttgacgagcattcctaggggtctttcccctctcgccaaaggaatgcaaggtctgttgaatgtcgtgaaggaagcagttcctctggaagcttcttgaagacaaacaacgtctgtagcgaccctttgcaggcagcggaaccccccacctggcgacaggtgcctctgcggccaaaagccacgtgtataagatacacctgcaaaggcggcacaaccccagtgccacgttgtgagttggatagttgtggaaagagtcaaatggctctcctcaagcgtattcaacaaggggctgaaggatgcccagaaggtaccccattgtatgggatctgatctggggcctcggtgcacatgctttacatgtgtttagtcgaggttaaaaaaacgtctaggccccccgaaccacggggacgtggttttcctttgaaaaacacgatgataatatggccacaaccatgatgagcaagggcgaggaggataacatggccatcatcaaggagttcatgcgcttcaaggtgcacatggagggctccgtgaacggccacgagttcgagatcgagggcgagggcgagggccgcccctacgagggcacccagaccgccaagctgaaggtgaccaagggtggccccctgcccttcgcctgggacatcctgtcccctcagttcatgtacggctccaaggcctacgtgaagcaccccgccgacatccccgactacttgaagctgtccttccccgagggcttcaagtgggagcgcgtgatgaacttcgaggacggcggcgtggtgaccgtgacccaggactcctccctgcaggacggcgagttcatctacaaggtgaagctgcgcggcaccaacttcccctccgacggccccgtaatgcagaagaagaccatgggctgggaggcctcctccgagcggatgtaccccgaggacggcgccctgaagggcgagatcaagcagaggctgaagctgaaggacggcggccactacgacgctgaggtcaagaccacctacaaggccaagaagcccgtgcagctgcccggcgcctacaacgtcaacatcaagttggacatcacctcccacaacgaggactacaccatcgtggaacagtacgaacgcgccgagggccgccactccaccggcggcatggacgagctgtacaagtaa

SEQ ID NO: 919 - DNA, 963 bp, Artificial Sequence
  Description of Artificial Sequence: Synthetic Construct
atggactggacatggatactcttcctggtagcagccgccacacgagtgcacagcaactgggtgaatgtaataagtgatttgaaaaaaattgaagatcttattcaatctatgcatattgatgctactttatatacggaaagtgatgttcaccccagttgcaaagtaacagcaatgaagtgctttctcttggagttacaagttatttcacttgagtccggagatgcaagtattcatgatacagtagaaaatctgatcatcctagcaaacaacagtttgtcttctaatgggaatgtaacagaatctggatgcaaagaatgtgaggaactggaggaaaaaaatattaaagaatttttgcagagttttgtacatattgtccaaatgttcatcaacacttctggttccgttggttcgctaaactgcatcgtcgctgtgtcccagaacatgggcatcggcaagaacggggacctgccctggccaccgctcaggaatgaattcagatatttccagagaatgaccacaacctcttcagtagaaggtaaacagaatctggtgattatgggtaagaagacctggttctccattcctgagaagaatcgacctttaaagggtagaattaatttagttctcagcagagaactcaaggaacctccacaaggagctcattttctttccagaagtctagatgatgccttaaaacttactgaacaaccagaattagcaaataaagtagacatggtctggatagttggtggcagttctgttattaaggaagccatgaatcacccaggccatcttaaactatttgtgacaaggatcatgcaagactttgaaagtgacacgttttttccagaaattgatttggagaaatataaacttctgccagaatacccaggtgttctctctgatgtccaggaggagaaaggcattaagtacaaatttgaagtatatgagaagaatgattga

SEQ ID NO: 920 - DNA, 708 bp, Artificial Sequence; identical to SEQ ID NO: 858
  Description of Artificial Sequence: Synthetic Construct

SEQ ID NO: 921 - DNA, 1735 bp, Artificial Sequence
  Description of Artificial Sequence: Synthetic Construct
atggactggacatggatactcttcctggtagcagccgccacacgagtgcacagcaactgggtgaatgtaataagtgatttgaaaaaaattgaagatcttattcaatctatgcatattgatgctactttatatacggaaagtgatgttcaccccagttgcaaagtaacagcaatgaagtgctttctcttggagttacaagttatttcacttgagtccggagatgcaagtattcatgatacagtagaaaatctgatcatcctagcaaacaacagtttgtcttctaatgggaatgtaacagaatctggatgcaaagaatgtgaggaactggaggaaaaaaatattaaagaatttttgcagagttttgtacatattgtccaaatgttcatcaacacttctggatcctgaaatctagataatacgactcactagagatcccgcccctctccctcccccccccctaacgttactggccgaagccgcttggaataaggccggtgtgcgtttgtctatatgttattttccaccatattgccgtcttttggcaatgtgagggcccggaaacctggccctgtcttcttgacgagcattcctaggggtctttcccctctcgccaaaggaatgcaaggtctgttgaatgtcgtgaaggaagcagttcctctggaagcttcttgaagacaaacaacgtctgtagcgaccctttgcaggcagcggaaccccccacctggcgacaggtgcctctgcggccaaaagccacgtgtataagatacacctgcaaaggcggcacaaccccagtgccacgttgtgagttggatagttgtggaaagagtcaaatggctctcctcaagcgtattcaacaaggggctgaaggatgcccagaaggtaccccattgtatgggatctgatctggggcctcggtgcacatgctttacatgtgtttagtcgaggttaaaaaaacgtctaggccccccgaaccacggggacgtggttttcctttgaaaaacacgatgataatatggccacaaccatgatgagcaagggcgaggaggataacatggccatcatcaaggagttcatgcgcttcaaggtgcacatggagggctccgtgaacggccacgagttcgagatcgagggcgagggcgagggccgcccctacgagggcacccagaccgccaagctgaaggtgaccaagggtggccccctgcccttcgcctgggacatcctgtcccctcagttcatgtacggctccaaggcctacgtgaagcaccccgccgacatccccgactacttgaagctgtccttccccgagggcttcaagtgggagcgcgtgatgaacttcgaggacggcggcgtggtgaccgtgacccaggactcctccctgcaggacggcgagttcatctacaaggtgaagctgcgcggcaccaacttcccctccgacggccccgtaatgcagaagaagaccatgggctgggaggcctcctccgagcggatgtaccccgaggacggcgccctgaagggcgagatcaagcagaggctgaagctgaaggacggcggccactacgacgctgaggtcaagaccacctacaaggccaagaagcccgtgcagctgcccggcgcctacaacgtcaacatcaagttggacatcacctcccacaacgaggactacaccatcgtggaacagtacgaacgcgccgagggccgccactccaccggcggcatggacgagctgtacaagtaa

SEQ ID NO: 922 - DNA, 405 bp, Artificial Sequence
  Description of Artificial Sequence: Synthetic Construct
atggactggacatggatactcttcctggtagcagccgccacacgagtgcacagcaactgggtgaatgtaataagtgatttgaaaaaaattgaagatcttattcaatctatgcatattgatgctactttatatacggaaagtgatgttcaccccagttgcaaagtaacagcaatgaagtgctttctcttggagttacaagttatttcacttgagtccggagatgcaagtattcatgatacagtagaaaatctgatcatcctagcaaacaacagtttgtcttctaatgggaatgtaacagaatctggatgcaaagaatgtgaggaactggaggaaaaaaatattaaagaatttttgcagagttttgtacatattgtccaaatgttcatcaacacttctggatcctga

SEQ ID NO: 923 - DNA, 708 bp, Artificial Sequence; identical to SEQ ID NO: 858
  Description of Artificial Sequence: Synthetic Construct

SEQ ID NO: 924-1029 - skipped (106 entries)

SEQ ID NO: 1030 - protein, 8 aa, Artificial Sequence
  Description of Artificial Sequence: Synthetic peptide
DYKDDDDK

SEQ ID NO: 1031 - protein, 4 aa, Artificial Sequence
  Description of Artificial Sequence: Synthetic peptide
GGGG

SEQ ID NO: 1032 - protein, 8 aa, Artificial Sequence
  Description of Artificial Sequence: Synthetic peptide
GGGGGGGG

SEQ ID NO: 1033 - protein, 8 aa, Artificial Sequence
  Description of Artificial Sequence: Synthetic peptide
  MOD_RES (2)..(2): Val or Ile
  MOD_RES (4)..(4): Any amino acid
DXEXNPGP

SEQ ID NO: 1034 - protein, 273 aa, Artificial Sequence
  Description of Artificial Sequence: Synthetic single chain variable fragment
GAHAQPVLTQPPSVSVAPGQTAKITCGGNNIGSKSVHWYQQKPGQAPVLVVYDDSDRPSGIPERFSGSNSGNAATLTISRVEAGDEADYYCQVWDSSSGLVFGTGTKVTVLSGGSTITSYNVYDTKLSSSGTEVQLLESGAEVKKPGESLKISCKGSGYSFTSYWIGWVRQMPGKGLEWMGIIYPGDSDTRYSPSSQGQVTISADKSISTAYLRWSGLKASDTAMYYCARVSSDSGAFDIWGQGTMVTVSSASGKPIPNPLLGLDSTHHHHHH

SEQ ID NO: 1035 - protein, 293 aa, Artificial Sequence
  Description of Artificial Sequence: Synthetic single chain variable fragment
MKYLLPTAAAGLLLLAASGAHASYELTQPPSVSVAPGKTATIPCGGNNIESKSVHWYQQRPGQAPVLVIYDDTDRPSGIPERFSGSNSGNTATLTISGVEAGDEADYFCQVWDSHSDHEVFGGGTKLTVLSGGSTITSYNVYYTKLSSSGSEVQLVETGGGLVQPGGSLRLSCAASGFTFSSYEMNWVRQAPGKGLEWVSYISSSGSTIYYADSVKGRFTISRDNAKNSLYLQMNSLRAEDTAVYYCAREHEWEAGAFDIWGQGTMVTVSSASGKPIPNPLLGLDSTHHHHHH

SEQ ID NO: 1036 - protein, 275 aa, Artificial Sequence
  Description of Artificial Sequence: Synthetic single chain variable fragment
  MOD_RES (236)..(236): Any amino acid
  MOD_RES (245)..(245): Any amino acid
GAHASYELTQPPSVSVAPGKTATIPCGGNNIESKSVHWYQQRPGQAPVLVIYDDTDRPSGIPERFSGSNSGNTATLTISGVEAGDEADYFCQVWDSHSDHEVFGGGTKLTVLSGGSTITSYNVYYTKLSSSGSEVQLVETGGGLVQPGGSLRLSCAASGFTFSSYEMNWVRQAPGKGLEWVSYISSSGSTIYYADSVKGRFTISRDNAKNSLYLQMNSLRAEDTAVYYCAREHEWXAGAFDIWGXGTMVTVSSASGKPIPNPLLGLDSTHHHHHH

SEQ ID NO: 1037 - DNA, 822 bp, Artificial Sequence
  Description of Artificial Sequence: Synthetic single chain variable fragment
ggcgcgcatgcccagccagtgctgactcagcccccctcggtgtcagtggccccgggacagacggccaagatcacctgtgggggaaacaacattggaagtaaaagtgtgcactggtaccagcagaagccaggccaggcccctgtgctggtcgtctatgatgatagcgaccggccctcagggatccctgagcgattctctggctccaactctgggaacgcggccaccctgaccatcagcagggtcgaagccggggatgaggccgactattactgtcaggtgtgggatagtagtagtggccttgtcttcggaactgggaccaaggtcaccgtcctatccggagggtcgaccataacttcgtataatgtatacgatacgaagttatcctcgagcggtaccgaggtgcagttgttggagtctggagcagaggtgaaaaagccgggggagtctctgaagatctcctgtaagggttctggatacagctttaccagctactggatcggctgggtgcgccagatgcccgggaaaggcctggagtggatggggatcatctatcctggtgactctgataccagatacagcccgtcctcccaaggccaggtcaccatctcagccgacaagtccatcagcaccgcctacctgcggtggagcggcctgaaggcctcggacaccgccatgtattactgtgcgagagtatcgagtgactccggtgcttttgatatctggggccaagggacaatggtcaccgtctcttcagctagcggcaaaccaatcccaaacccactgctgggcctggatagtactcaccatcaccatcaccattag

SEQ ID NO: 1038 - DNA, 882 bp, Artificial Sequence
  Description of Artificial Sequence: Synthetic single chain variable fragment
atgaaatacctattgcctacggcagccgctggattgttattactcgcagcaagcggcgcgcatgcctcctatgagctgacacagccaccctcggtgtcagtggccccaggaaagacggccacaattccctgtgggggaaacaacattgagagtaaaagtgtccactggtaccagcagcggccaggccaggcccctgtcttggtcatctatgatgataccgaccggccctcagggatccctgagcgattctctggctccaactctgggaacacggccaccctgaccatcagcggggtcgaagccggggatgaggccgactatttctgtcaggtgtgggatagtcatagtgatcatgaggtgttcggcggagggaccaagctcaccgtcctatccggagggtcgaccataacttcgtataatgtatactatacgaagttatcctcgagcggttccgaggtgcagctggtggagaccgggggaggcttggtacagcctggagggtccctgagactctcctgtgcagcctctggattcaccttcagtagttatgaaatgaactgggtccgccaggctccagggaaggggctggagtgggtttcatacattagtagtagtggcagtaccatatactacgcagactctgtgaagggccgattcaccatctccagagacaacgccaagaactcactgtatctgcaaatgaacagcctgagagctgaggacacggctgtttattactgtgcgagagagcatgagtgggaggcgggcgcttttgatatctggggccaagggacaatggtcaccgtctcttcagctagcggcaaaccaatcccaaacccactgctgggcctggatagtactcaccatcaccatcaccattga

SEQ ID NO: 1039 - protein, 20 aa, Artificial Sequence
  Description of Artificial Sequence: Synthetic Signal sequence
ALPVTALLLPLALLLHAARP

SEQ ID NO: 1040 - DNA, 60 bp, Artificial Sequence
  Description of Artificial Sequence: Synthetic Signal sequence
gccttaccagtgaccgccttgctcctgccgctggccttgctgctccacgccgccaggccg

SEQ ID NO: 1041 - DNA, 12 bp, Artificial Sequence
  Description of Artificial Sequence: Synthetic Linker
ggtggatccgga

SEQ ID NO: 1042 - DNA, 11 bp, Artificial Sequence
  Description of Artificial Sequence: Synthetic Spacer
atcgggctagc

SEQ ID NO: 1043 - DNA, 57 bp, Artificial Sequence
  Description of Artificial Sequence: Synthetic Spacer
gctactaacttcagcctgctgaagcaggctggagacgtggaggagaaccctggacct

SEQ ID NO: 1044 - protein, 486 aa, Artificial Sequence; identical to SEQ ID NO: 475
  Description of Artificial Sequence: Synthetic Construct

SEQ ID NO: 1045-1069 - skipped (25 entries)

SEQ ID NO: 1070 - DNA, 3709 bp, Artificial Sequence
  Description of Artificial Sequence: Synthetic Construct
atggccttaccagtgaccgccttgctcctgccgctggccttgctgctccacgccgccaggccggacatccagatgacacagactacatcctccctgtctgcctctctgggagacagagtcaccatcagttgcagggcaagtcaggacattagtaaatatttaaattggtatcagcagaaaccagatggaactgttaaactcctgatctaccatacatcaagattacactcaggagtcccatcaaggttcagtggcagtgggtctggaacagattattctctcaccattagcaacctggagcaagaagatattgccacttacttttgccaacagggtaatacgcttccgtacacgttcggaggggggaccaagctggagatcacaggtggcggtggctcgggcggtggtgggtcgggtggcggcggatctgaggtgaaactgcaggagtcaggacctggcctggtggcgccctcacagagcctgtccgtcacatgcactgtctcaggggtctcattacccgactatggtgtaagctggattcgccagcctccacgaaagggtctggagtggctgggagtaatatggggtagtgaaaccacatactataattcagctctcaaatccagactgaccatcatcaaggacaactccaagagccaagttttcttaaaaatgaacagtctgcaaactgatgacacagccatttactactgtgccaaacattattactacggtggtagctatgctatggactactggggccaaggaacctcagtcaccgtctcctcaaccacgacgccagcgccgcgaccaccaacaccggcgcccaccatcgcgtcgcagcccctgtccctgcgcccagaggcgtgccggccagcggcggggggcgcagtgcacacgagggggctggacttcgcctgtgatatctacatctgggcgcccttggccgggacttgtggggtccttctcctgtcactggttatcaccctttactgcaaacggggcagaaagaaactcctgtatatattcaaacaaccatttatgagaccagtacaaactactcaagaggaagatggctgtagctgccgatttccagaagaagaagaaggaggatgtgaactgagagtgaagttcagcaggagcgcagacgcccccgcgtacaagcagggccagaaccagctctataacgagctcaatctaggacgaagagaggagtacgatgttttggacaagagacgtggccgggaccctgagatggggggaaagccgagaaggaagaaccctcaggaaggcctgtacaatgaactgcagaaagataagatggcggaggcctacagtgagattgggatgaaaggcgagcgccggaggggcaaggggcacgatggcctttaccagggtctcagtacagccaccaaggacacctacgacgcccttcacatgcaggccctgccccctcgctaaatcgggctagccgcccctctccctcccccccccctaacgttactggccgaagccgcttggaataaggccggtgtgcgtttgtctatatgttattttccaccatattgccgtcttttggcaatgtgagggcccggaaacctggccctgtcttcttgacgagcattcctaggggtctttcccctctcgccaaaggaatgcaaggtctgttgaatgtcgtgaaggaagcagttcctctggaagcttcttgaagacaaacaacgtctgtagcgaccctttgcaggcagcggaaccccccacctggcgacaggtgcctctgcggccaaaagccacgtgtataagatacacctgcaaaggcggcacaaccccagtgccacgttgtgagttggatagttgtggaaagagtcaaatggctctcctcaagcgtattcaacaaggggctgaaggatgcccagaaggtaccccattgtatgggatctgatctggggcctcggtgcacatgctttacatgtgtttagtcgaggttaaaaaaacgtctaggccccccgaaccacggggacgtggttttcctttgaaaaacacgatgataagcttgccacaacccacaaggagacgaccttccatgtgccaccaacagctcgtgatcagctggttctccctggtgttcctggctagccccctggtggccatctgggagctcaagaaagacgtgtacgtggtggaactggactggtaccccgacgcccctggcgaaatggtggtgctgacatgcgacacccctgaggaggatggcattacctggaccctcgatcagagctccgaggtgctgggcagcggcaaaaccctgaccatccaggtgaaggagtttggcgatgccggccagtacacatgtcacaagggcggcgaggtgctgagccactccctgctgctgctccacaagaaggaagatggcatctggagcaccgacattctgaaggatcagaaggagcccaagaacaagacattcctgaggtgtgaggccaagaactacagcggcaggtttacctgctggtggctgacaacaatcagcaccgacctcacattctccgtcaagtcctccaggggttcttccgaccctcaaggcgtgacatgcggcgctgccaccctgagcgctgagagagtcaggggcgacaacaaggagtacgagtacagcgtcgaatgtcaggaggacagcgcctgtcccgccgctgaagagagcctgcctatcgaggtgatggtggacgccgtgcacaaactgaagtatgagaattacacctccagcttcttcatcagggacatcatcaaacccgatccccccaagaacctgcagctgaagcctctgaagaacagcagacaggtcgaagtgtcctgggagtaccctgatacctggtccacaccccacagctacttcagcctgaccttttgcgtgcaggtgcagggcaagagcaaaagggagaagaaggacagggtgtttaccgacaagacctccgccacagtgatttgcagaaagaacgcctccatcagcgtgagggcccaggacaggtattacagcagctcctggagcgaatgggctagcgtgccctgtagcggaggaggaggcagcggaggaggaggttctggaggaggcggcagcagaaacctgcctgtcgctacccccgaccccggaatgttcccctgcctgcaccactcccagaacctcctgagggccgtgtccaacatgctgcagaaggctagacagaccctcgaattctacccctgtaccagcgaggagatcgaccatgaggacatcaccaaggataagaccagcaccgtggaggcttgcctgcctctggagctgaccaaaaacgagagctgcctgaacagcagggaaaccagcttcattaccaacggctcctgcctggcctccaggaagacatccttcatgatggccctgtgcctcagcagcatctacgaggacctgaagatgtatcaggtggagtttaagaccatgaatgccaagctgctgatggaccctaagaggcagatcttcctggaccagaatatgctggccgtgattgacgagctgatgcaggccctcaactttaacagcgagaccgtgccccagaaaagcagcctcgaagagcctgacttctacaaaaccaagattaagctgtgtatcctgctgcacgccttcaggatcagggccgtgaccatcgacagggtgatgagctacctgaacgccagcggatcctaa

SEQ ID NO: 1071 - DNA, 1461 bp, Artificial Sequence; identical to SEQ ID NO: 835
  Description of Artificial Sequence: Synthetic Construct

SEQ ID NO: 1072 - protein, 542 aa, Artificial Sequence; identical to SEQ ID NO: 846
  Description of Artificial Sequence: Synthetic Construct

SEQ ID NO: 1073 - DNA, 1629 bp, Artificial Sequence
  Description of Artificial Sequence: Synthetic Construct
atgtgccaccaacagctcgtgatcagctggttctccctggtgttcctggctagccccctggtggccatctgggagctcaagaaagacgtgtacgtggtggaactggactggtaccccgacgcccctggcgaaatggtggtgctgacatgcgacacccctgaggaggatggcattacctggaccctcgatcagagctccgaggtgctgggcagcggcaaaaccctgaccatccaggtgaaggagtttggcgatgccggccagtacacatgtcacaagggcggcgaggtgctgagccactccctgctgctgctccacaagaaggaagatggcatctggagcaccgacattctgaaggatcagaaggagcccaagaacaagacattcctgaggtgtgaggccaagaactacagcggcaggtttacctgctggtggctgacaacaatcagcaccgacctcacattctccgtcaagtcctccaggggttcttccgaccctcaaggcgtgacatgcggcgctgccaccctgagcgctgagagagtcaggggcgacaacaaggagtacgagtacagcgtcgaatgtcaggaggacagcgcctgtcccgccgctgaagagagcctgcctatcgaggtgatggtggacgccgtgcacaaactgaagtatgagaattacacctccagcttcttcatcagggacatcatcaaacccgatccccccaagaacctgcagctgaagcctctgaagaacagcagacaggtcgaagtgtcctgggagtaccctgatacctggtccacaccccacagctacttcagcctgaccttttgcgtgcaggtgcagggcaagagcaaaagggagaagaaggacagggtgtttaccgacaagacctccgccacagtgatttgcagaaagaacgcctccatcagcgtgagggcccaggacaggtattacagcagctcctggagcgaatgggctagcgtgccctgtagcggaggaggaggcagcggaggaggaggttctggaggaggcggcagcagaaacctgcctgtcgctacccccgaccccggaatgttcccctgcctgcaccactcccagaacctcctgagggccgtgtccaacatgctgcagaaggctagacagaccctcgaattctacccctgtaccagcgaggagatcgaccatgaggacatcaccaaggataagaccagcaccgtggaggcttgcctgcctctggagctgaccaaaaacgagagctgcctgaacagcagggaaaccagcttcattaccaacggctcctgcctggcctccaggaagacatccttcatgatggccctgtgcctcagcagcatctacgaggacctgaagatgtatcaggtggagtttaagaccatgaatgccaagctgctgatggaccctaagaggcagatcttcctggaccagaatatgctggccgtgattgacgagctgatgcaggccctcaactttaacagcgagaccgtgccccagaaaagcagcctcgaagagcctgacttctacaaaaccaagattaagctgtgtatcctgctgcacgccttcaggatcagggccgtgaccatcgacagggtgatgagctacctgaacgccagcggatcctaa

SEQ ID NO: 1074 - protein, 1049 aa, Artificial Sequence
  Description of Artificial Sequence: Synthetic Construct
MALPVTALLLPLALLLHAARPDIQMTQTTSSLSASLGDRVTISCRASQDISKYLNWYQQKPDGTVKLLIYHTSRLHSGVPSRFSGSGSGTDYSLTISNLEQEDIATYFCQQGNTLPYTFGGGTKLEITGGGGSGGGGSGGGGSEVKLQESGPGLVAPSQSLSVTCTVSGVSLPDYGVSWIRQPPRKGLEWLGVIWGSETTYYNSALKSRLTIIKDNSKSQVFLKMNSLQTDDTAIYYCAKHYYYGGSYAMDYWGQGTSVTVSSTTTPAPRPPTPAPTIASQPLSLRPEACRPAAGGAVHTRGLDFACDIYIWAPLAGTCGVLLLSLVITLYCKRGRKKLLYIFKQPFMRPVQTTQEEDGCSCRFPEEEEGGCELRVKFSRSADAPAYKQGQNQLYNELNLGRREEYDVLDKRRGRDPEMGGKPRRKNPQEGLYNELQKDKMAEAYSEIGMKGERRRGKGHDGLYQGLSTATKDTYDALHMQALPPRGSATNFSLLKQAGDVEENPGPMCHQQLVISWFSLVFLASPLVAIWELKKDVYVVELDWYPDAPGEMVVLTCDTPEEDGITWTLDQSSEVLGSGKTLTIQVKEFGDAGQYTCHKGGEVLSHSLLLLHKKEDGIWSTDILKDQKEPKNKTFLRCEAKNYSGRFTCWWLTTISTDLTFSVKSSRGSSDPQGVTCGAATLSAERVRGDNKEYEYSVECQEDSACPAAEESLPIEVMVDAVHKLKYENYTSSFFIRDIIKPDPPKNLQLKPLKNSRQVEVSWEYPDTWSTPHSYFSLTFCVQVQGKSKREKKDRVFTDKTSATVICRKNASISVRAQDRYYSSSWSEWASVPCSGGGGSGGGGSGGGGSRNLPVATPDPGMFPCLHHSQNLLRAVSNMLQKARQTLEFYPCTSEEIDHEDITKDKTSTVEACLPLELTKNESCLNSRETSFITNGSCLASRKTSFMMALCLSSIYEDLKMYQVEFKTMNAKLLMDPKRQIFLDQNMLAVIDELMQALNFNSETVPQKSSLEEPDFYKTKIKLCILLHAFRIRAVTIDRVMSYLNASGS

SEQ ID NO: 1075 - DNA, 3150 bp, Artificial Sequence
  Description of Artificial Sequence: Synthetic Construct
atggccttaccagtgaccgccttgctcctgccgctggccttgctgctccacgccgccaggccggacatccagatgacacagactacatcctccctgtctgcctctctgggagacagagtcaccatcagttgcagggcaagtcaggacattagtaaatatttaaattggtatcagcagaaaccagatggaactgttaaactcctgatctaccatacatcaagattacactcaggagtcccatcaaggttcagtggcagtgggtctggaacagattattctctcaccattagcaacctggagcaagaagatattgccacttacttttgccaacagggtaatacgcttccgtacacgttcggaggggggaccaagctggagatcacaggtggcggtggctcgggcggtggtgggtcgggtggcggcggatctgaggtgaaactgcaggagtcaggacctggcctggtggcgccctcacagagcctgtccgtcacatgcactgtctcaggggtctcattacccgactatggtgtaagctggattcgccagcctccacgaaagggtctggagtggctgggagtaatatggggtagtgaaaccacatactataattcagctctcaaatccagactgaccatcatcaaggacaactccaagagccaagttttcttaaaaatgaacagtctgcaaactgatgacacagccatttactactgtgccaaacattattactacggtggtagctatgctatggactactggggccaaggaacctcagtcaccgtctcctcaaccacgacgccagcgccgcgaccaccaacaccggcgcccaccatcgcgtcgcagcccctgtccctgcgcccagaggcgtgccggccagcggcggggggcgcagtgcacacgagggggctggacttcgcctgtgatatctacatctgggcgcccttggccgggacttgtggggtccttctcctgtcactggttatcaccctttactgcaaacggggcagaaagaaactcctgtatatattcaaacaaccatttatgagaccagtacaaactactcaagaggaagatggctgtagctgccgatttccagaagaagaagaaggaggatgtgaactgagagtgaagttcagcaggagcgcagacgcccccgcgtacaagcagggccagaaccagctctataacgagctcaatctaggacgaagagaggagtacgatgttttggacaagagacgtggccgggaccctgagatggggggaaagccgagaaggaagaaccctcaggaaggcctgtacaatgaactgcagaaagataagatggcggaggcctacagtgagattgggatgaaaggcgagcgccggaggggcaaggggcacgatggcctttaccagggtctcagtacagccaccaaggacacctacgacgcccttcacatgcaggccctgccccctcgcggatcagctactaacttcagcctgctgaagcaggctggagacgtggaggagaaccctggacctatgtgccaccaacagctcgtgatcagctggttctccctggtgttcctggctagccccctggtggccatctgggagctcaagaaagacgtgtacgtggtggaactggactggtaccccgacgcccctggcgaaatggtggtgctgacatgcgacacccctgaggaggatggcattacctggaccctcgatcagagctccgaggtgctgggcagcggcaaaaccctgaccatccaggtgaaggagtttggcgatgccggccagtacacatgtcacaagggcggcgaggtgctgagccactccctgctgctgctccacaagaaggaagatggcatctggagcaccgacattctgaaggatcagaaggagcccaagaacaagacattcctgaggtgtgaggccaagaactacagcggcaggtttacctgctggtggctgacaacaatcagcaccgacctcacattctccgtcaagtcctccaggggttcttccgaccctcaaggcgtgacatgcggcgctgccaccctgagcgctgagagagtcaggggcgacaacaaggagtacgagtacagcgtcgaatgtcaggaggacagcgcctgtcccgccgctgaagagagcctgcctatcgaggtgatggtggacgccgtgcacaaactgaagtatgagaattacacctccagcttcttcatcagggacatcatcaaacccgatccccccaagaacctgcagctgaagcctctgaagaacagcagacaggtcgaagtgtcctgggagtaccctgatacctggtccacaccccacagctacttcagcctgaccttttgcgtgcaggtgcagggcaagagcaaaagggagaagaaggacagggtgtttaccgacaagacctccgccacagtgatttgcagaaagaacgcctccatcagcgtgagggcccaggacaggtattacagcagctcctggagcgaatgggctagcgtgccctgtagcggaggaggaggcagcggaggaggaggttctggaggaggcggcagcagaaacctgcctgtcgctacccccgaccccggaatgttcccctgcctgcaccactcccagaacctcctgagggccgtgtccaacatgctgcagaaggctagacagaccctcgaattctacccctgtaccagcgaggagatcgaccatgaggacatcaccaaggataagaccagcaccgtggaggcttgcctgcctctggagctgaccaaaaacgagagctgcctgaacagcagggaaaccagcttcattaccaacggctcctgcctggcctccaggaagacatccttcatgatggccctgtgcctcagcagcatctacgaggacctgaagatgtatcaggtggagtttaagaccatgaatgccaagctgctgatggaccctaagaggcagatcttcctggaccagaatatgctggccgtgattgacgagctgatgcaggccctcaactttaacagcgagaccgtgccccagaaaagcagcctcgaagagcctgacttctacaaaaccaagattaagctgtgtatcctgctgcacgccttcaggatcagggccgtgaccatcgacagggtgatgagctacctgaacgccagcggatcctga

SEQ ID NO: 1076-1078 - skipped (3 entries)

SEQ ID NO: 1079 - DNA, 4036 bp, Artificial Sequence
  Description of Artificial Sequence: Synthetic Construct
atggccttaccagtgaccgccttgctcctgccgctggccttgctgctccacgccgccaggccggacatccagatgacacagactacatcctccctgtctgcctctctgggagacagagtcaccatcagttgcagggcaagtcaggacattagtaaatatttaaattggtatcagcagaaaccagatggaactgttaaactcctgatctaccatacatcaagattacactcaggagtcccatcaaggttcagtggcagtgggtctggaacagattattctctcaccattagcaacctggagcaagaagatattgccacttacttttgccaacagggtaatacgcttccgtacacgttcggaggggggaccaagctggagatcacaggtggcggtggctcgggcggtggtgggtcgggtggcggcggatctgaggtgaaactgcaggagtcaggacctggcctggtggcgccctcacagagcctgtccgtcacatgcactgtctcaggggtctcattacccgactatggtgtaagctggattcgccagcctccacgaaagggtctggagtggctgggagtaatatggggtagtgaaaccacatactataattcagctctcaaatccagactgaccatcatcaaggacaactccaagagccaagttttcttaaaaatgaacagtctgcaaactgatgacacagccatttactactgtgccaaacattattactacggtggtagctatgctatggactactggggccaaggaacctcagtcaccgtctcctcaaccacgacgccagcgccgcgaccaccaacaccggcgcccaccatcgcgtcgcagcccctgtccctgcgcccagaggcgtgccggccagcggcggggggcgcagtgcacacgagggggctggacttcgcctgtgatatctacatctgggcgcccttggccgggacttgtggggtccttctcctgtcactggttatcaccctttactgcaaacggggcagaaagaaactcctgtatatattcaaacaaccatttatgagaccagtacaaactactcaagaggaagatggctgtagctgccgatttccagaagaagaagaaggaggatgtgaactgagagtgaagttcagcaggagcgcagacgcccccgcgtacaagcagggccagaaccagctctataacgagctcaatctaggacgaagagaggagtacgatgttttggacaagagacgtggccgggaccctgagatggggggaaagccgagaaggaagaaccctcaggaaggcctgtacaatgaactgcagaaagataagatggcggaggcctacagtgagattgggatgaaaggcgagcgccggaggggcaaggggcacgatggcctttaccagggtctcagtacagccaccaaggacacctacgacgcccttcacatgcaggccctgccccctcgctaaatcgggctagccgcccctctccctcccccccccctaacgttactggccgaagccgcttggaataaggccggtgtgcgtttgtctatatgttattttccaccatattgccgtcttttggcaatgtgagggcccggaaacctggccctgtcttcttgacgagcattcctaggggtctttcccctctcgccaaaggaatgcaaggtctgttgaatgtcgtgaaggaagcagttcctctggaagcttcttgaagacaaacaacgtctgtagcgaccctttgcaggcagcggaaccccccacctggcgacaggtgcctctgcggccaaaagccacgtgtataagatacacctgcaaaggcggcacaaccccagtgccacgttgtgagttggatagttgtggaaagagtcaaatggctctcctcaagcgtattcaacaaggggctgaaggatgcccagaaggtaccccattgtatgggatctgatctggggcctcggtgcacatgctttacatgtgtttagtcgaggttaaaaaaacgtctaggccccccgaaccacggggacgtggttttcctttgaaaaacacgatgataagcttgccacaacccacaaggagacgaccttccatgtgccaccaacagctcgtgatcagctggttctccctggtgttcctggctagccccctggtggccatctgggagctcaagaaagacgtgtacgtggtggaactggactggtaccccgacgcccctggcgaaatggtggtgctgacatgcgacacccctgaggaggatggcattacctggaccctcgatcagagctccgaggtgctgggcagcggcaaaaccctgaccatccaggtgaaggagtttggcgatgccggccagtacacatgtcacaagggcggcgaggtgctgagccactccctgctgctgctccacaagaaggaagatggcatctggagcaccgacattctgaaggatcagaaggagcccaagaacaagacattcctgaggtgtgaggccaagaactacagcggcaggtttacctgctggtggctgacaacaatcagcaccgacctcacattctccgtcaagtcctccaggggttcttccgaccctcaaggcgtgacatgcggcgctgccaccctgagcgctgagagagtcaggggcgacaacaaggagtacgagtacagcgtcgaatgtcaggaggacagcgcctgtcccgccgctgaagagagcctgcctatcgaggtgatggtggacgccgtgcacaaactgaagtatgagaattacacctccagcttcttcatcagggacatcatcaaacccgatccccccaagaacctgcagctgaagcctctgaagaacagcagacaggtcgaagtgtcctgggagtaccctgatacctggtccacaccccacagctacttcagcctgaccttttgcgtgcaggtgcagggcaagagcaaaagggagaagaaggacagggtgtttaccgacaagacctccgccacagtgatttgcagaaagaacgcctccatcagcgtgagggcccaggacaggtattacagcagctcctggagcgaatgggctagcgtgccctgtagcggaggaggaggcagcggaggaggaggttctggaggaggcggcagcagaaacctgcctgtcgctacccccgaccccggaatgttcccctgcctgcaccactcccagaacctcctgagggccgtgtccaacatgctgcagaaggctagacagaccctcgaattctacccctgtaccagcgaggagatcgaccatgaggacatcaccaaggataagaccagcaccgtggaggcttgcctgcctctggagctgaccaaaaacgagagctgcctgaacagcagggaaaccagcttcattaccaacggctcctgcctggcctccaggaagacatccttcatgatggccctgtgcctcagcagcatctacgaggacctgaagatgtatcaggtggagtttaagaccatgaatgccaagctgctgatggaccctaagaggcagatcttcctggaccagaatatgctggccgtgattgacgagctgatgcaggccctcaactttaacagcgagaccgtgccccagaaaagcagcctcgaagagcctgacttctacaaaaccaagattaagctgtgtatcctgctgcacgccttcaggatcagggccgtgaccatcgacagggtgatgagctacctgaacgccagcggtggatccggaggagtgcaggtggagacaatcagccccggcgatggcaggacctttcctaagcgcggccagacatgcgtggtgcactacaccggcatgctgggcgacggcaagaaggtggacagctcccgggatagaaataagcccttcaagtttatgctgggcaagcaggaagtgatcagaggctgggaggagggagtggcacagatgtctgtgggacagggcgccaagctgacaatcagcccagattacgcatatggagcaaccggacacccaggaatcatcccaccccacgccaccctggtgttcgacgtggagctgctggagctggagtaa

SEQ ID NO: 1080 - protein, 651 aa, Artificial Sequence; identical to SEQ ID NO: 565
  Description of Artificial Sequence: Synthetic Construct

SEQ ID NO: 1081 - DNA, 1956 bp, Artificial Sequence
  Description of Artificial Sequence: Synthetic Construct
atgtgccaccaacagctcgtgatcagctggttctccctggtgttcctggctagccccctggtggccatctgggagctcaagaaagacgtgtacgtggtggaactggactggtaccccgacgcccctggcgaaatggtggtgctgacatgcgacacccctgaggaggatggcattacctggaccctcgatcagagctccgaggtgctgggcagcggcaaaaccctgaccatccaggtgaaggagtttggcgatgccggccagtacacatgtcacaagggcggcgaggtgctgagccactccctgctgctgctccacaagaaggaagatggcatctggagcaccgacattctgaaggatcagaaggagcccaagaacaagacattcctgaggtgtgaggccaagaactacagcggcaggtttacctgctggtggctgacaacaatcagcaccgacctcacattctccgtcaagtcctccaggggttcttccgaccctcaaggcgtgacatgcggcgctgccaccctgagcgctgagagagtcaggggcgacaacaaggagtacgagtacagcgtcgaatgtcaggaggacagcgcctgtcccgccgctgaagagagcctgcctatcgaggtgatggtggacgccgtgcacaaactgaagtatgagaattacacctccagcttcttcatcagggacatcatcaaacccgatccccccaagaacctgcagctgaagcctctgaagaacagcagacaggtcgaagtgtcctgggagtaccctgatacctggtccacaccccacagctacttcagcctgaccttttgcgtgcaggtgcagggcaagagcaaaagggagaagaaggacagggtgtttaccgacaagacctccgccacagtgatttgcagaaagaacgcctccatcagcgtgagggcccaggacaggtattacagcagctcctggagcgaatgggctagcgtgccctgtagcggaggaggaggcagcggaggaggaggttctggaggaggcggcagcagaaacctgcctgtcgctacccccgaccccggaatgttcccctgcctgcaccactcccagaacctcctgagggccgtgtccaacatgctgcagaaggctagacagaccctcgaattctacccctgtaccagcgaggagatcgaccatgaggacatcaccaaggataagaccagcaccgtggaggcttgcctgcctctggagctgaccaaaaacgagagctgcctgaacagcagggaaaccagcttcattaccaacggctcctgcctggcctccaggaagacatccttcatgatggccctgtgcctcagcagcatctacgaggacctgaagatgtatcaggtggagtttaagaccatgaatgccaagctgctgatggaccctaagaggcagatcttcctggaccagaatatgctggccgtgattgacgagctgatgcaggccctcaactttaacagcgagaccgtgccccagaaaagcagcctcgaagagcctgacttctacaaaaccaagattaagctgtgtatcctgctgcacgccttcaggatcagggccgtgaccatcgacagggtgatgagctacctgaacgccagcggtggatccggaggagtgcaggtggagacaatcagccccggcgatggcaggacctttcctaagcgcggccagacatgcgtggtgcactacaccggcatgctgggcgacggcaagaaggtggacagctcccgggatagaaataagcccttcaagtttatgctgggcaagcaggaagtgatcagaggctgggaggagggagtggcacagatgtctgtgggacagggcgccaagctgacaatcagcccagattacgcatatggagcaaccggacacccaggaatcatcccaccccacgccaccctggtgttcgacgtggagctgctggagctggagtaa

SEQ ID NO: 1082 - protein, 1158 aa, Artificial Sequence
  Description of Artificial Sequence: Synthetic Construct
MALPVTALLLPLALLLHAARPDIQMTQTTSSLSASLGDRVTISCRASQDISKYLNWYQQKPDGTVKLLIYHTSRLHSGVPSRFSGSGSGTDYSLTISNLEQEDIATYFCQQGNTLPYTFGGGTKLEITGGGGSGGGGSGGGGSEVKLQESGPGLVAPSQSLSVTCTVSGVSLPDYGVSWIRQPPRKGLEWLGVIWGSETTYYNSALKSRLTIIKDNSKSQVFLKMNSLQTDDTAIYYCAKHYYYGGSYAMDYWGQGTSVTVSSTTTPAPRPPTPAPTIASQPLSLRPEACRPAAGGAVHTRGLDFACDIYIWAPLAGTCGVLLLSLVITLYCKRGRKKLLYIFKQPFMRPVQTTQEEDGCSCRFPEEEEGGCELRVKFSRSADAPAYKQGQNQLYNELNLGRREEYDVLDKRRGRDPEMGGKPRRKNPQEGLYNELQKDKMAEAYSEIGMKGERRRGKGHDGLYQGLSTATKDTYDALHMQALPPRGSATNFSLLKQAGDVEENPGPMCHQQLVISWFSLVFLASPLVAIWELKKDVYVVELDWYPDAPGEMVVLTCDTPEEDGITWTLDQSSEVLGSGKTLTIQVKEFGDAGQYTCHKGGEVLSHSLLLLHKKEDGIWSTDILKDQKEPKNKTFLRCEAKNYSGRFTCWWLTTISTDLTFSVKSSRGSSDPQGVTCGAATLSAERVRGDNKEYEYSVECQEDSACPAAEESLPIEVMVDAVHKLKYENYTSSFFIRDIIKPDPPKNLQLKPLKNSRQVEVSWEYPDTWSTPHSYFSLTFCVQVQGKSKREKKDRVFTDKTSATVICRKNASISVRAQDRYYSSSWSEWASVPCSGGGGSGGGGSGGGGSRNLPVATPDPGMFPCLHHSQNLLRAVSNMLQKARQTLEFYPCTSEEIDHEDITKDKTSTVEACLPLELTKNESCLNSRETSFITNGSCLASRKTSFMMALCLSSIYEDLKMYQVEFKTMNAKLLMDPKRQIFLDQNMLAVIDELMQALNFNSETVPQKSSLEEPDFYKTKIKLCILLHAFRIRAVTIDRVMSYLNASGGSGGVQVETISPGDGRTFPKRGQTCVVHYTGMLGDGKKVDSSRDRNKPFKFMLGKQEVIRGWEEGVAQMSVGQGAKLTISPDYAYGATGHPGIIPPHATLVFDVELLELE

SEQ ID NO: 1083 - DNA, 1956 bp, Artificial Sequence; identical to SEQ ID NO: 1081
  Description of Artificial Sequence: Synthetic Construct

SEQ ID NO: 1084 - protein, 875 aa, Homo sapiens
MERAGPSFGQQRQQQQPQQQKQQQRDQDSVEAWLDDHWDFTFSYFVRKATREMVNAWFAERVHTIPVCKEGIRGHTESCSCPLQQSPRADNSAPGTPTRKISASEFDRPLRPIVVKDSEGTVSFLSDSEKKEQMPLTPPRFDHDEGDQCSRLLELVKDISSHLDVTALCHKIFLHIHGLISADRYSLFLVCEDSSNDKFLISRLFDVAEGSTLEEVSNNCIRLEWNKGIVGHVAALGEPLNIKDAYEDPRFNAEVDQITGYKTQSILCMPIKNHREEVVGVAQAINKKSGNGGTFTEKDEKDFAAYLAFCGIVLHNAQLYETSLLENKRNQVLLDLASLIFEEQQSLEVILKKIAATIISFMQVQKCTIFIVDEDCSDSFSSVFHMECEELEKSSDTLTREHDANKINYMYAQYVKNTMEPLNIPDVSKDKRFPWTTENTGNVNQQCIRSLLCTPIKNGKKNKVIGVCQLVNKMEENTGKVKPFNRNDEQFLEAFVIFCGLGIQNTQMYEAVERAMAKQMVTLEVLSYHASAAEEETRELQSLAAAVVPSAQTLKITDFSFSDFELSDLETALCTIRMFTDLNLVQNFQMKHEVLCRWILSVKKNYRKNVAYHNWRHAFNTAQCMFAALKAGKIQNKLTDLEILALLIAALSHDLDHRGVNNSYIQRSEHPLAQLYCHSIMEHHHFDQCLMILNSPGNQILSGLSIEEYKTTLKIIKQAILATDLALYIKRRGEFFELIRKNQFNLEDPHQKELFLAMLMTACDLSAITKPWPIQQRIAELVATEFFDQGDRERKELNIEPTDLMNREKKNKIPSMQVGFIDAICLQLYEALTHVSEDCFPLLDGCRKNRQKWQALAEQQEKMLINGESGQAKRN

SEQ ID NO: 1085 - protein, 326 aa, Homo sapiens
EETRELQSLAAAVVPSAQTLKITDFSFSDFELSDLETALCTIRMFTDLNLVQNFQMKHEVLCRWILSVKKNYRKNVAYHNWRHAFNTAQCMFAALKAGKIQNKLTDLEILALLIAALSHDLDHRGVNNSYIQRSEHPLAQLYCHSIMEHHHFDQCLMILNSPGNQILSGLSIEEYKTTLKIIKQAILATDLALYIKRRGEFFELIRKNQFNLEDPHQKELFLAMLMTACDLSAITKPWPIQQRIAELVATEFFDQGDRERKELNIEPTDLMNREKKNKIPSMQVGFIDAICLQLYEALTHVSEDCFPLLDGCRKNRQKWQALAEQQ

SEQ ID NO: 1086 - protein, 505 aa, Homo sapiens
MGETLGDSPIDPESDSFTDTLSANISQEMTMVDTEMPFWPTNFGISSVDLSVMEDHSHSFDIKPFTTVDFSSISTPHYEDIPFTRTDPVVADYKYDLKLQEYQSAIKVEPASPPYYSEKTQLYNKPHEEPSNSLMAIECRVCGDKASGFHYGVHACEGCKGFFRRTIRLKLIYDRCDLNCRIHKKSRNKCQYCRFQKCLAVGMSHNAIRFGRMPQAEKEKLLAEISSDIDQLNPESADLRALAKHLYDSYIKSFPLTKAKARAILTGKTTDKSPFVIYDMNSLMMGEDKIKFKHITPLQEQSKEVAIRIFQGCQFRSVEAVQEITEYAKSIPGFVNLDLNDQVTLLKYGVHEIIYTMLASLMNKDGVLISEGQGFMTREFLKSLRKPFGDFMEPKFEFAVKFNALELDDSDLAIFIAVIILSGDRPGLLNVKPIEDIQDNLLQALELQLKLNHPESSQLFAKLLQKMTDLRQIVTEHVQLLQVIKKTETDMSLHPLLQEIYKDLY

SEQ ID NO: 1087 - protein, 108 aa, Homo sapiens
MGVQVETISPGDGRTFPKRGQTCVVHYTGMLEDGKKFDSSRDRNKPFKFMLGKQEVIRGWEEGVAQMSVGQRAKLTISPDYAYGATGHPGIIPPHATLVFDVELLKLE

SEQ ID NO: 1088 - protein, 158 aa, Artificial Sequence
  Description of Artificial Sequence: Synthetic Destabilizing Domain (DD)
ISLIAALAVDYVIGMENAMPWNLPADLAWFKRNTLNKPVIMGRHTWESIGRPLPGRKNIILSSQPSTDDRVTWVKSVDEAIAACGDVPEIMVIGGGRVIEQFLPKAQKLYLTHIDAEVEGDTHFPDYEPDDWESVFSEFHDADAQNSHSYCFEILERR

SEQ ID NO: 1089 - protein, 108 aa, Artificial Sequence
  Description of Artificial Sequence: Synthetic Destabilizing Domain (DD)
MGVQVETISPGDGRTFPKRGQTCVVHYTGMLEDGKKVDSSRDRNKPFKFMLGKQEVIRGWEEGVAQMSVGQRAKLTISPDYAYGATGHPGIIPPHATLVFDVELLKPE

SEQ ID NO: 1090 - protein, 108 aa, Artificial Sequence
  Description of Artificial Sequence: Synthetic Destabilizing Domain (DD)
MGVQVETISPGDGRTFPKRGQTCVVHYTGMLGDGKKVDSSRDRNKPFKFMLGKQEVIRGWEEGVAQMSVGQGAKLTISPDYAYGATGHPGIIPPHATLVFDVELLELE

SEQ ID NO: 1091 - protein, 328 aa, Homo sapiens
MCHQQLVISWFSLVFLASPLVAIWELKKDVYVVELDWYPDAPGEMVVLTCDTPEEDGITWTLDQSSEVLGSGKTLTIQVKEFGDAGQYTCHKGGEVLSHSLLLLHKKEDGIWSTDILKDQKEPKNKTFLRCEAKNYSGRFTCWWLTTISTDLTFSVKSSRGSSDPQGVTCGAATLSAERVRGDNKEYEYSVECQEDSACPAAEESLPIEVMVDAVHKLKYENYTSSFFIRDIIKPDPPKNLQLKPLKNSRQVEVSWEYPDTWSTPHSYFSLTFCVQVQGKSKREKKDRVFTDKTSATVICRKNASISVRAQDRYYSSSWSEWASVPCS

SEQ ID NO: 1092 - DNA, 2761 bp, Homo sapiens
gggcatacagttgttccatcccgacatgaactcagcctcccgtctgaccgccccttggccttccttcttcctcgatctgtggaacccagggaatctgcctagtgctgtctccaagcaccttggccatgatgtaaacccagagaaattagcatctccatctccttccttattccccacccaaaagtcatttcctcttagttcattacctgggattttgatgtctatgttccctcctcgttattgatacacacacagagagagacaaacaaaaaaggaacttcttgaaattcccccagaaggttttgagagttgttttcaatgttgcaacaagtcagtttctagtttaagtttccatcagaaaggagtagagtatataagttccagtaccagcaacagcagcagaagaaacaacatctgtttcagggccattggactctccgtcctgcccagagcaagatgtgtcaccagcagttggtcatctcttggttttccctggtttttctggcatctcccctcgtggccatatgggaactgaagaaagatgtttatgtcgtagaattggattggtatccggatgcccctggagaaatggtggtcctcacctgtgacacccctgaagaagatggtatcacctggaccttggaccagagcagtgaggtcttaggctctggcaaaaccctgaccatccaagtcaaagagtttggagatgctggccagtacacctgtcacaaaggaggcgaggttctaagccattcgctcctgctgcttcacaaaaaggaagatggaatttggtccactgatattttaaaggaccagaaagaacccaaaaataagacctttctaagatgcgaggccaagaattattctggacgtttcacctgctggtggctgacgacaatcagtactgatttgacattcagtgtcaaaagcagcagaggctcttctgacccccaaggggtgacgtgcggagctgctacactctctgcagagagagtcagaggggacaacaaggagtatgagtactcagtggagtgccaggaggacagtgcctgcccagctgctgaggagagtctgcccattgaggtcatggtggatgccgttcacaagctcaagtatgaaaactacaccagcagcttcttcatcagggacatcatcaaacctgacccacccaagaacttgcagctgaagccattaaagaattctcggcaggtggaggtcagctgggagtaccctgacacctggagtactccacattcctacttctccctgacattctgcgttcaggtccagggcaagagcaagagagaaaagaaagatagagtcttcacggacaagacctcagccacggtcatctgccgcaaaaatgccagcattagcgtgcgggcccaggaccgctactatagctcatcttggagcgaatgggcatctgtgccctgcagttaggttctgatccaggatgaaaatttggaggaaaagtggaagatattaagcaaaatgtttaaagacacaacggaatagacccaaaaagataatttctatctgatttgctttaaaacgtttttttaggatcacaatgatatctttgctgtatttgtatagttagatgctaaatgctcattgaaacaatcagctaatttatgtatagattttccagctctcaagttgccatgggccttcatgctatttaaatatttaagtaatttatgtatttattagtatattactgttatttaacgtttgtctgccaggatgtatggaatgtttcatactcttatgacctgatccatcaggatcagtccctattatgcaaaatgtgaatttaattttatttgtactgacaacttttcaagcaaggctgcaagtacatcagttttatgacaatcaggaagaatgcagtgttctgataccagtgccatcatacacttgtgatggatgggaacgcaagagatacttacatggaaacctgacaatgcaaacctgttgagaagatccaggagaacaagatgctagttcccatgtctgtgaagacttcctggagatggtgttgataaagcaatttagggccacttacacttctaagcaagtttaatctttggatgcctgaattttaaaagggctagaaaaaaatgattgaccagcctgggaaacataacaagaccccgtctctacaaaaaaaatttaaaattagccaggcgtggtggctcatgcttgtggtcccagctgttcaggaggatgaggcaggaggatctcttgagcccaggaggtcaaggctatggtgagccgtgattgtgccactgcataccagcctaggtgacagaatgagaccctgtctcaaaaaaaaaaatgattgaaattaaaattcagctttagcttccatggcagtcctcacccccacctctctaaaagacacaggaggatgacacagaaacaccgtaagtgtctggaaggcaaaaagatcttaagattcaagagagaggacaagtagttatggctaaggacatgaaattgtcagaatggcaggtggcttcttaacagccctgtgagaagcagacagatgcaaagaaaatctggaatccctttctcattagcatgaatgaacctgatacacaattatgaccagaaaatatggctccatgaaggtgctacttttaagtaatgtatgtgcgctctgtaaagtgattacatttgtttcctgtttgtttatttatttatttatttttgcattctgaggctgaactaataaaaactcttctttgtaatc

SEQ ID NO: 1093 - protein, 253 aa, Homo sapiens
MWPPGSASQPPPSPAAATGLHPAARPVSLQCRLSMCPARSLLLVATLVLLDHLSLARNLPVATPDPGMFPCLHHSQNLLRAVSNMLQKARQTLEFYPCTSEEIDHEDITKDKTSTVEACLPLELTKNESCLNSRETSFITNGSCLASRKTSFMMALCLSSIYEDLKMYQVEFKTMNAKLLMDPKRQIFLDQNMLAVIDELMQALNFNSETVPQKSSLEEPDFYKTKIKLCILLHAFRIRAVTIDRVMSYLNAS

SEQ ID NO: 1094 - DNA, 1522 bp, Homo sapiens
acggggcgtccggctaaggccggggacccagggtggtgggcggggtgtcccgcccgcctgtggaccccgcgcagtaactgcgaacatttcgctttcattttgggccgagctggaggcggcggggccgtcccggaacggctgcggccgggcaccccgggagttaatccgaaagcgccgcaagccccgcgggccggccgcaccgcacgtgtcaccgagaagctgatgtagagagagacacagaaggagacagaaagcaagagaccagagtcccgggaaagtcctgccgcgcctcgggacaattataaaaatgtggccccctgggtcagcctcccagccaccgccctcacctgccgcggccacaggtctgcatccagcggctcgccctgtgtccctgcagtgccggctcagcatgtgtccagcgcgcagcctcctccttgtggctaccctggtcctcctggaccacctcagtttggccagaaacctccccgtggccactccagacccaggaatgttcccatgccttcaccactcccaaaacctgctgagggccgtcagcaacatgctccagaaggccagacaaactctagaattttacccttgcacttctgaagagattgatcatgaagatatcacaaaagataaaaccagcacagtggaggcctgtttaccattggaattaaccaagaatgagagttgcctaaattccagagagacctctttcataactaatgggagttgcctggcctccagaaagacctcttttatgatggccctgtgccttagtagtatttatgaagacttgaagatgtaccaggtggagttcaagaccatgaatgcaaagcttctgatggatcctaagaggcagatctttctagatcaaaacatgctggcagttattgatgagctgatgcaggccctgaatttcaacagtgagactgtgccacaaaaatcctcccttgaagaaccggatttttataaaactaaaatcaagctctgcatacttcttcatgctttcagaattcgggcagtgactattgatagagtgatgagctatctgaatgcttcctaaaaagcgaggtccctccaaaccgttgtcatttttataaaactttgaaatgaggaaactttgataggatgtggattaagaactagggagggggaaagaaggatgggactattacatccacatgatacctctgatcaagtatttttgacatttactgtggataaattgtttttaagttttcatgaatgaattgctaagaagggaaaatatccatcctgaaggtgtttttcattcactttaatagaagggcaaatatttataagctatttctgtaccaaagtgtttgtggaaacaaacatgtaagcataacttattttaaaatatttatttatataacttggtaatcatgaaagcatctgagctaacttatatttatttatgttatatttattaaattatttatcaagtgtatttgaaaaatatttttaagtgttctaaaaataaaagtattgaatt

SEQ ID NO: 1095 - protein, 162 aa, Homo sapiens
MRISKPHLRSISIQCYLCLLLNSHFLTEAGIHVFILGCFSAGLPKTEANWVNVISDLKKIEDLIQSMHIDATLYTESDVHPSCKVTAMKCFLLELQVISLESGDASIHDTVENLIILANNSLSSNGNVTESGCKECEELEEKNIKEFLQSFVHIVQMFINTS

SEQ ID NO: 1096 - DNA, 2472 bp, Homo sapiens
actccgggtggcaggcgcccgggggaatcccagctgactcgctcactgccttcgaagtccggcgccccccgggagggaactgggtggccgcaccctcccggctgcggtggctgtcgccccccaccctgcagccaggactcgatggaggtacagagctcggcttctttgccttgggaggggagtggtggtggttgaaagggcgatggaattttccccgaaagcctacgcccagggcccctcccagctccagcgttaccctccggtctatcctactggccgagctgccccgccttctcatggggaaaacttagccgcaacttcaatttttggtttttcctttaatgacacttctgaggctctcctagccatcctcccgcttccggaggagcgcagatcgcaggtccctttgcccctggcgtgcgactccctactgcgctgcgctcttacggcgttccaggctgctggctagcgcaaggcgggccgggcaccccgcgctccgctgggagggtgagggacgcgcgtctggcggccccagccaagctgcgggtttctgagaagacgctgtcccgcagccctgagggctgagttctgcacccagtcaagctcaggaaggccaagaaaagaatccattccaatatatggccatgtggctctttggagcaatgttccatcatgttccatgctgctgacgtcacatggagcacagaaatcaatgttagcagatagccagcccatacaagatcgtattgtattgtaggaggcattgtggatggatggctgctggaaaccccttgccatagccagctcttcttcaatacttaaggatttaccgtggctttgagtaatgagaatttcgaaaccacatttgagaagtatttccatccagtgctacttgtgtttacttctaaacagtcattttctaactgaagctggcattcatgtcttcattttgggctgtttcagtgcagggcttcctaaaacagaagccaactgggtgaatgtaataagtgatttgaaaaaaattgaagatcttattcaatctatgcatattgatgctactttatatacggaaagtgatgttcaccccagttgcaaagtaacagcaatgaagtgctttctcttggagttacaagttatttcacttgagtccggagatgcaagtattcatgatacagtagaaaatctgatcatcctagcaaacaacagtttgtcttctaatgggaatgtaacagaatctggatgcaaagaatgtgaggaactggaggaaaaaaatattaaagaatttttgcagagttttgtacatattgtccaaatgttcatcaacacttcttgattgcaattgattctttttaaagtgtttctgttattaacaaacatcactctgctgcttagacataacaaaacactcggcatttcaaatgtgctgtcaaaacaagtttttctgtcaagaagatgatcagaccttggatcagatgaactcttagaaatgaaggcagaaaaatgtcattgagtaatatagtgactatgaacttctctcagacttactttactcatttttttaatttattattgaaattgtacatatttgtggaataatgtaaaatgttgaataaaaatatgtacaagtgttgttttttaagttgcactgatattttacctcttattgcaaaatagcatttgtttaagggtgatagtcaaattatgtattggtggggctgggtaccaatgctgcaggtcaacagctatgctggtaggctcctgccagtgtggaaccactgactactggctctcattgacttccttactaagcatagcaaacagaggaagaatttgttatcagtaagaaaaagaagaactatatgtgaatcctcttctttatactgtaatttagttattgatgtataaagcaactgttatgaaataaagaaattgcaataactggcatataatgtccatcagtaaatcttggtggtggtggcaataataaacttctactgataggtagaatggtgtgcaagcttgtccaatcacggattgcaggccacatgcggcccaggacaactttgaatgtggcccaacacaaattcataaactttcatacatctcgtttttagctcatcagctatcattagcggtagtgtatttaaagtgtggcccaagacaattcttcttattccaatgtggcccagggaaatcaaaagattggatgcccctggtatagaaaactaatagtgacagtgttcatatttcatgctttcccaaatacaggtattttattttcacattctttttgccatgtttatataataataaagaaaaaccctgttgatttgttggagccattgttatctgacagaaaataattgtttatattttttgcactacactgtctaaaattagcaagctctcttctaatggaactgtaagaaagatgaaatatttttgttttattataaatttatttcaccttaa

SEQ ID NO: 1097 - protein, 267 aa, Homo sapiens; identical to SEQ ID NO: 882

SEQ ID NO: 1098 - DNA, 1626 bp, Homo sapiens
tggcggggcggcaggtcccagagcagcgctcgccacctccccccggcctgggcagcgctcgcccggggagtccagcggtgtcctgtggagctgccgccatggccccgcggcgggcgcgcggctgccggaccctcggtctcccggcgctgctactgctgctgctgctccggccgccggcgacgcggggcatcacgtgccctccccccatgtccgtggaacacgcagacatctgggtcaagagctacagcttgtactccagggagcggtacatttgtaactctggtttcaagcgtaaagccggcacgtccagcctgacggagtgcgtgttgaacaaggccacgaatgtcgcccactggacaacccccagtctcaaatgcattagagaccctgccctggttcaccaaaggccagcgccaccctccacagtaacgacggcaggggtgaccccacagccagagagcctctccccttctggaaaagagcccgcagcttcatctcccagctcaaacaacacagcggccacaacagcagctattgtcccgggctcccagctgatgccttcaaaatcaccttccacaggaaccacagagataagcagtcatgagtcctcccacggcaccccctctcagacaacagccaagaactgggaactcacagcatccgcctcccaccagccgccaggtgtgtatccacagggccacagcgacaccactgtggctatctccacgtccactgtcctgctgtgtgggctgagcgctgtgtctctcctggcatgctacctcaagtcaaggcaaactcccccgctggccagcgttgaaatggaagccatggaggctctgccggtgacttgggggaccagcagcagagatgaagacttggaaaactgctctcaccacctatgaaactcggggaaaccagcccagctaagtccggagtgaaggagcctctctgctttagctaaagacgactgagaagaggtgcaaggaagcgggctccaggagcaagctcaccaggcctctcagaagtcccagcaggatctcacggactgccgggtcggcgcctcctgcgcgagggagcaggttctccgcattcccatgggcaccacctgcctgcctgtcgtgccttggacccagggcccagcttcccaggagagaccaaaggcttctgagcaggatttttatttcattacagtgtgagctgcctggaatacatgtggtaatgaaataaaaaccctgccccgaatcttccgtccctcatcctaactttcagttcacagagaaaagtgacatacccaaagctctctgtcaattacaaggcttctcctggcgtgggagacgtctacagggaagacaccagcgtttgggcttctaaccaccctgtctccagctgctctgcacacatggacagggacctgggaaaggtgggagagatgctgagcccagcgaatcctctccattgaaggattcaggaagaagaaaactcaactcagtgccattttacgaatatatgcgtttatatttatacttccttgtctattatatctatacattatatattatttgtattttgacattgtaccttgtataaacaaaataaaacatctattttcaatatttttaaaatgca

SEQ ID NO: 1099 - DNA, 1184 bp, Artificial Sequence
  Description of Artificial Sequence: Synthetic Promoter
cgtgaggctccggtgcccgtcagtgggcagagcgcacatcgcccacagtccccgagaagttggggggaggggtcggcaattgaaccggtgcctagagaaggtggcgcggggtaaactgggaaagtgatgtcgtgtactggctccgcctttttcccgagggtgggggagaaccgtatataagtgcagtagtcgccgtgaacgttctttttcgcaacgggtttgccgccagaacacaggtaagtgccgtgtgtggttcccgcgggcctggcctctttacgggttatggcccttgcgtgccttgaattacttccacctggctgcagtacgtgattcttgatcccgagcttcgggttggaagtgggtgggagagttcgaggccttgcgcttaaggagccccttcgcctcgtgcttgagttgaggcctggcctgggcgctggggccgccgcgtgcgaatctggtggcaccttcgcgcctgtctcgctgctttcgataagtctctagccatttaaaatttttgatgacctgctgcgacgctttttttctggcaagatagtcttgtaaatgcgggccaagatctgcacactggtatttcggtttttggggccgcgggcggcgacggggcccgtgcgtcccagcgcacatgttcggcgaggcggggcctgcgagcgcggccaccgagaatcggacgggggtagtctcaagctggccggcctgctctggtgcctggcctcgcgccgccgtgtatcgccccgccctgggcggcaaggctggcccggtcggcaccagttgcgtgagcggaaagatggccgcttcccggccctgctgcagggagctcaaaatggaggacgcggcgctcgggagagcgggcgggtgagtcacccacacaaaggaaaagggcctttccgtcctcagccgtcgcttcatgtgactccactgagtaccgggcgccgtccaggcacctcgattagttctcgtgcttttggagtacgtcgtctttaggttggggggaggggttttatgcgatggagtttccccacactgagtgggtggagactgaagttaggccagcttggcacttgatgtaattctccttggaatttgccctttttgagtttggatcttggttcattctcaagcctcagacagtggttcaaagtttttttcttccatttcaggtgtcgtga

SEQ ID NO: 1100 - DNA, 508 bp, Artificial Sequence
  Description of Artificial Sequence: Synthetic Promoter
cgttacataacttacggtaaatggcccgcctggctgaccgcccaacgacccccgcccattgacgtcaataatgacgtatgttcccatagtaacgccaatagggactttccattgacgtcaatgggtggagtatttacggtaaactgcccacttggcagtacatcaagtgtatcatatgccaagtacgccccctattgacgtcaatgacggtaaatggcccgcctggcattatgcccagtacatgaccttatgggactttcctacttggcagtacatctacgtattagtcatcgctattaccatggtgatgcggttttggcagtacatcaatgggcgtggatagcggtttgactcacggggatttccaagtctccaccccattgacgtcaatgggagtttgttttggcaccaaaatcaacgggactttccaaaatgtcgtaacaactccgccccattgacgcaaatgggcggtaggcgtgtacggtgggaggtctatataagcagagct

SEQ ID NO: 1101 - DNA, 512 bp, Artificial Sequence
  Description of Artificial Sequence: Synthetic Promoter
atcgatgggtaggggaggcgcttttcccaaggcagtctggagcatgcgctttagcagccccgctgggcacttggcgctacacaagtggcctctggcctcgcacacattccacatccaccggtaggcgccaaccggctccgttctttggtggccccttcgcgccaccttctactcctcccctagtcaggaagttcccccccgccccgcagctcgcgtcgtgcaggacgtgacaaatggaagtagcacgtctcactagtctcgtgcagatggacagcaccgctgagcaatggaagcgggtaggcctttggggcagcggccaatagcagctttgctccttcgctttctgggctcagaggctgggaaggggtgggtccgggggcgggctcaggggcgggctcaggggcggggcgggcgcccgaaggtcctccggaggcccggcattctgcacgcttcaaaagcgcacgtctgccgcgctgttctcctcttcctcatctccgggcctttcgctcgag

SEQ ID NO: 1102 - DNA, 507 bp, Artificial Sequence
  Description of Artificial Sequence: Synthetic Promoter
atcgatgggtaggggaggcgcttttcccaaggcagtctggagcatgcgctttagcagccccgctgggcacttggcgctacacaagtggcctctggcctcgcacacattccacatccaccggtaggcgccaaccggctccgttctttggtggccccttcgcgccaccttctactcctcccctagtcaggaagttcccccccgccccgcagctcgcgtcgtgcaggacgtgacaaatggaagtagcacgtctcactagtctcgtgcagatggacagcaccgctgagcaatggaagcgggtaggcctttggggcagcggccaatagcagctttgctccttcgctttctgggctcagaggctgggaaggggtgggtccgggggcgggctcaggggcgggctcaggggcggggcgggcgcccgaaggtcctccggaggcccggcattctgcacgcttcaaaagcgcacgtctgccgcgctgttctcctcttcctcatctccgggcctttcgc

SEQ ID NO: 1103 - DNA, 1184 bp, Artificial Sequence
  Description of Artificial Sequence: Synthetic Promoter
cgtgaggctccggtgcccgtcagtgggcagagcgcacatcgcccacagtccccgagaagttggggggaggggtcggcaattgaaccggtgcctagagaaggtggcgcggggtaaactgggaaagtgatgtcgtgtactggctccgcctttttcccgagggtgggggagaaccgtatataagtgcagtagtcgccgtgaacgttctttttcgcaacgggtttgccgccagaacacaggtaagtgccgtgtgtggttcccgcgggcctggcctctttacgggttatggcccttgcgtgccttgaattacttccacctggctgcagtacgtgattcttgatcccgagcttcgggttggaagtgggtgggagagttcgaggccttgcgcttaaggagccccttcgcctcgtgcttgagttgaggcctggcctgggcgctggggccgccgcgtgcgaatctggtggcaccttcgcgcctgtctcgctgctttcgataagtctctagccatttaaaatttttgatgacctgctgcgacgctttttttctggcaagatagtcttgtaaatgcgggccaagatctgcacactggtatttcggtttttggggccgcgggcggcgacggggcccgtgcgtcccagcgcacatgttcggcgaggcggggcctgcgagcgcggccaccgagaatcggacgggggtagtctcaagctggccggcctgctctggtgcctggcctcgcgccgccgtgtatcgccccgccctgggcggcaaggctggcccggtcggcaccagttgcgtgagcggaaagatggccgcttcccggccctgctgcagggagctcaaaatggaggacgcggcgctcgggagagcgggcgggtgagtcacccacacaaaggaaaagggcctttccgtcctcagccgtcgcttcatgtgactccactgagtaccgggcgccgtccaggcacctcgattagttctcgagcttttggagtacgtcgtctttaggttggggggaggggttttatgcgatggagtttccccacactgagtgggtggagactgaagttaggccagcttggcacttgatgtaattctccttggaatttgccctttttgagtttggatcttggttcattctcaagcctcagacagtggttcaaagtttttttcttccatttcaggtgtcgtga

SEQ ID NO: 1104 - protein, 486 aa, Artificial Sequence; identical to SEQ ID NO: 475
  Description of Artificial Sequence: Synthetic Construct

SEQ ID NO: 1105 - protein, 651 aa, Artificial Sequence; identical to SEQ ID NO: 565
  Description of Artificial Sequence: Synthetic Construct

SEQ ID NO: 1106 - DNA, 1461 bp, Artificial Sequence; identical to SEQ ID NO: 541
  Description of Artificial Sequence: Synthetic Construct

SEQ ID NO: 1107 - DNA, 1956 bp, Artificial Sequence; identical to SEQ ID NO: 609
  Description of Artificial Sequence: Synthetic Construct

SEQ ID NO: 1108 - DNA, 12 bp, Artificial Sequence
  Description of Artificial Sequence: Synthetic Linker
ggtggatccgga

SEQ ID NO: 1109 - protein, 4 aa, Artificial Sequence
  Description of Artificial Sequence: Synthetic Linker
GSSG

SEQ ID NO: 1110 - DNA, 12 bp, Artificial Sequence
  Description of Artificial Sequence: Synthetic Linker
ggatccagcggc

SEQ ID NO: 1111 - DNA, 474 bp, Artificial Sequence
  Description of Artificial Sequence: Synthetic Destabilizing Domain (DD)
atctcacttatcgcagccttggcagttgattatgtgatcggcatggaaaatgcgatgccatggaatcttccggccgacctcgcttggttcaaacgcaacaccctgaacaaacccgttattatgggccgacatacatgggaaagtatcggcaggccattgcccggtcggaaaaacataatcctttcctcccagccgggcacggacgatagagtgacttgggtcaaatcagttgacgaggccattgctgcctgcggcgatgtacccgagattatggttatcggaggggggcgagttattgagcagtttctgcccaaagcgcagaagttgtaccttactcatatagatgcagaggtagagggcgacacgcatttccccgactacgaaccggatgattgggaatccgtattttccgaattccacgacgcggatgcccaaaacagtcactcttactgttttgaaattcttgagcgacgc

SEQ ID NO: 1112 - DNA, 558 bp, Artificial Sequence
  Description of Artificial Sequence: Synthetic Linker
gttggttcgctaaactgcatcgtggccgtgagccagaacatgggcatcggcaagaatggcgacctgccttggccacctctgaggaacgagttcagatactttcagaggatgaccacaaccagctccgtggagggcaagcagaacctggtcatcatgggcaagaagacatggttctctatccccgagaagaaccgccctctgaagggccggatcaatctggtgctgagcagagagctgaaggagccaccacagggagcacacttcctgagccggagcctggacgatgccctgaagctgaccgagcagcccgagctggccaacaaggtggacatggtgtggatcgtgggcggctctagcgtgatcaaggaggccatgaatcacccaggccacctgaagctgttcgtgacaagaatcatgcaggactttgagtccgataccttctttcccgagatcgacctggagaagtacaagctgctgcctgagtatccaggcgtgctgtctgatgtgcaggaggagaagggcatcaagtacaagttcgaggtgtatgagaagaatgat

SEQ ID NO: 1113 - DNA, 558 bp, Artificial Sequence; identical to SEQ ID NO: 779
  Description of Artificial Sequence: Synthetic Destabilizing Domain (DD)

SEQ ID NO: 1114 - protein, 186 aa, Artificial Sequence
  Description of Artificial Sequence: Synthetic Destabilizing Domain (DD)
VGSLNCIVAVSQNMGAGKNGDLPWPPLRNEFRYFQRMTTTSSVEGKQNLVIMGKKTWFSIPEKNRPLKGRINLVLSRELKEPPQGAHFLSRSLDDALKLTEQPELANKVDMVWIVGGSSVYKEAMNHPGHLKLFVTRIMQDFESDTFFPEIDLEKYKLLPEYPGVLSDVQEEKGIKYKFEVYEKND

SEQ ID NO: 1115 - DNA, 558 bp, Artificial Sequence
  Description of Artificial Sequence: Synthetic Destabilizing Domain (DD)
gttggttcgctaaactgcatcgtcgctgtgtcccagaacatgggcgccggcaagaacggggacctgccctggccaccgctcaggaatgaattcagatatttccagagaatgaccacaacctcttcagtagaaggtaaacagaatctggtgattatgggtaagaagacctggttctccattcctgagaagaatcgacctttaaagggtagaattaatttagttctcagcagagaactcaaggaacctccacaaggagctcattttctttccagaagtctagatgatgccttaaaacttactgaacaaccagaattagcaaataaagtagacatggtctggatagttggtggcagttctgtttataaggaagccatgaatcacccaggccatcttaaactatttgtgacaaggatcatgcaagactttgaaagtgacacgttttttccagaaattgatttggagaaatataaacttctgccagaatacccaggtgttctctctgatgtccaggaggagaaaggcattaagtacaaatttgaagtatatgagaagaatgat

SEQ ID NO: 1116 - protein, 186 aa, Artificial Sequence
  Description of Artificial Sequence: Synthetic Destabilizing Domain (DD)
VGSLNCIVAVSQNMGAGKNGDLPWPPLRNEFRYFQRMTTTSSVEGKQNLVIMGKKTWFSIPEKNRPLKGRINLVLSRELKEPPQGAHFLSRSLDDALKLTEQPELANKVDMVWIVGGSSVIKEAMNHPGHLKLFVTRIMQDFESDTFFPEIDLEKYKLLPEYPGVLSDVQEEKGIKYKFEVYEKND

SEQ ID NO: 1117 - DNA, 558 bp, Artificial Sequence
  Description of Artificial Sequence: Synthetic Destabilizing Domain (DD)
gttggttcgctaaactgcatcgtcgctgtgtcccagaacatgggcgccggcaagaacggggacctgccctggccaccgctcaggaatgaattcagatatttccagagaatgaccacaacctcttcagtagaaggtaaacagaatctggtgattatgggtaagaagacctggttctccattcctgagaagaatcgacctttaaagggtagaattaatttagttctcagcagagaactcaaggaacctccacaaggagctcattttctttccagaagtctagatgatgccttaaaacttactgaacaaccagaattagcaaataaagtagacatggtctggatagttggtggcagttctgttattaaggaagccatgaatcacccaggccatcttaaactatttgtgacaaggatcatgcaagactttgaaagtgacacgttttttccagaaattgatttggagaaatataaacttctgccagaatacccaggtgttctctctgatgtccaggaggagaaaggcattaagtacaaatttgaagtatatgagaagaatgat

SEQ ID NO: 1118 - protein, 510 aa, Artificial Sequence
  Description of Artificial Sequence: Synthetic Construct
MALPVTALLLPLALLLHAARPDIQMTQTTSSLSASLGDRVTISCRASQDISKYLNWYQQKPDGTVKLLIYHTSRLHSGVPSRFSGSGSGTDYSLTISNLEQEDIATYFCQQGNTLPYTFGGGTKLEITGGGGSGGGGSGGGGSEVKLQESGPGLVAPSQSLSVTCTVSGVSLPDYGVSWIRQPPRKGLEWLGVIWGSETTYYNSALKSRLTIIKDNSKSQVFLKMNSLQTDDTAIYYCAKHYYYGGSYAMDYWGQGTSVTVSSTTTPAPRPPTPAPTIASQPLSLRPEACRPAAGGAVHTRGLDFACDIYIWAPLAGTCGVLLLSLVITLYCKRGRKKLLYIFKQPFMRPVQTTQEEDGCSCRFPEEEEGGCELRVKFSRSADAPAYKQGQNQLYNELNLGRREEYDVLDKRRGRDPEMGGKPRRKNPQEGLYNELQKDKMAEAYSEIGMKGERRRGKGHDGLYQGLSTATKDTYDALHMQALPPRGSGATNFSLLKQAGDVEENPGPGS

SEQ ID NO: 1119 - protein, 488 aa, Artificial Sequence; identical to SEQ ID NO: 806
  Description of Artificial Sequence: Synthetic Construct

SEQ ID NO: 1120 - protein, 486 aa, Artificial Sequence; identical to SEQ ID NO: 475
  Description of Artificial Sequence: Synthetic Construct

SEQ ID NO: 1121 - protein, 731 aa, Artificial Sequence
  Description of Artificial Sequence: Synthetic Construct
MCHQQLVISWFSLVFLASPLVAIWELKKDVYVVELDWYPDAPGEMVVLTCDTPEEDGITWTLDQSSEVLGSGKTLTIQVKEFGDAGQYTCHKGGEVLSHSLLLLHKKEDGIWSTDILKDQKEPKNKTFLRCEAKNYSGRFTCWWLTTISTDLTFSVKSSRGSSDPQGVTCGAATLSAERVRGDNKEYEYSVECQEDSACPAAEESLPIEVMVDAVHKLKYENYTSSFFIRDIIKPDPPKNLQLKPLKNSRQVEVSWEYPDTWSTPHSYFSLTFCVQVQGKSKREKKDRVFTDKTSATVICRKNASISVRAQDRYYSSSWSEWASVPCSGGGGSGGGGSGGGGSRNLPVATPDPGMFPCLHHSQNLLRAVSNMLQKARQTLEFYPCTSEEIDHEDITKDKTSTVEACLPLELTKNESCLNSRETSFITNGSCLASRKTSFMMALCLSSIYEDLKMYQVEFKTMNAKLLMDPKRQIFLDQNMLAVIDELMQALNFNSETVPQKSSLEEPDFYKTKIKLCILLHAFRIRAVTIDRVMSYLNASGGSGGVGSLNCIVAVSQNMGIGKNGDLPWPPLRNEFRYFQRMTTTSSVEGKQNLVIMGKKTWFSIPEKNRPLKGRINLVLSRELKEPPQGAHFLSRSLDDALKLTEQPELANKVDMVWIVGGSSVIKEAMYHPGHLKLFVTRIMQDFESDTFFPEIDLEKYKLLPEYPGVLSDVQEEKGIKYKFEVYEKND

SEQ ID NO: 1122 - protein, 486 aa, Artificial Sequence; identical to SEQ ID NO: 475
  Description of Artificial Sequence: Synthetic Construct

SEQ ID NO: 1123 - protein, 702 aa, Artificial Sequence
  Description of Artificial Sequence: Synthetic Construct
MCHQQLVISWFSLVFLASPLVAIWELKKDVYVVELDWYPDAPGEMVVLTCDTPEEDGITWTLDQSSEVLGSGKTLTIQVKEFGDAGQYTCHKGGEVLSHSLLLLHKKEDGIWSTDILKDQKEPKNKTFLRCEAKNYSGRFTCWWLTTISTDLTFSVKSSRGSSDPQGVTCGAATLSAERVRGDNKEYEYSVECQEDSACPAAEESLPIEVMVDAVHKLKYENYTSSFFIRDIIKPDPPKNLQLKPLKNSRQVEVSWEYPDTWSTPHSYFSLTFCVQVQGKSKREKKDRVFTDKTSATVICRKNASISVRAQDRYYSSSWSEWASVPCSGGGGSGGGGSGGGGSRNLPVATPDPGMFPCLHHSQNLLRAVSNMLQKARQTLEFYPCTSEEIDHEDITKDKTSTVEACLPLELTKNESCLNSRETSFITNGSCLASRKTSFMMALCLSSIYEDLKMYQVEFKTMNAKLLMDPKRQIFLDQNMLAVIDELMQALNFNSETVPQKSSLEEPDFYKTKIKLCILLHAFRIRAVTIDRVMSYLNASGSSGISLIAALAVDYVIGMENAMPWNLPADLAWFKRNTLNKPVIMGRHTWESIGRPLPGRKNIILSSQPGTDDRVTWVKSVDEAIAACGDVPEIMVIGGGRVIEQFLPKAQKLYLTHIDAEVEGDTHFPDYEPDDWESVFSEFHDADAQNSHSYCFEILERR

SEQ ID NO: 1124 - protein, 1209 aa, Artificial Sequence
  Description of Artificial Sequence: Synthetic Construct
MALPVTALLLPLALLLHAARPDIQMTQTTSSLSASLGDRVTISCRASQDISKYLNWYQQKPDGTVKLLIYHTSRLHSGVPSRFSGSGSGTDYSLTISNLEQEDIATYFCQQGNTLPYTFGGGTKLEITGGGGSGGGGSGGGGSEVKLQESGPGLVAPSQSLSVTCTVSGVSLPDYGVSWIRQPPRKGLEWLGVIWGSETTYYNSALKSRLTIIKDNSKSQVFLKMNSLQTDDTAIYYCAKHYYYGGSYAMDYWGQGTSVTVSSTTTPAPRPPTPAPTIASQPLSLRPEACRPAAGGAVHTRGLDFACDIYIWAPLAGTCGVLLLSLVITLYCKRGRKKLLYIFKQPFMRPVQTTQEEDGCSCRFPEEEEGGCELRVKFSRSADAPAYKQGQNQLYNELNLGRREEYDVLDKRRGRDPEMGGKPRRKNPQEGLYNELQKDKMAEAYSEIGMKGERRRGKGHDGLYQGLSTATKDTYDALHMQALPPRGSATNFSLLKQAGDVEENPGPMCHQQLVISWFSLVFLASPLVAIWELKKDVYVVELDWYPDAPGEMVVLTCDTPEEDGITWTLDQSSEVLGSGKTLTIQVKEFGDAGQYTCHKGGEVLSHSLLLLHKKEDGIWSTDILKDQKEPKNKTFLRCEAKNYSGRFTCWWLTTISTDLTFSVKSSRGSSDPQGVTCGAATLSAERVRGDNKEYEYSVECQEDSACPAAEESLPIEVMVDAVHKLKYENYTSSFFIRDIIKPDPPKNLQLKPLKNSRQVEVSWEYPDTWSTPHSYFSLTFCVQVQGKSKREKKDRVFTDKTSATVICRKNASISVRAQDRYYSSSWSEWASVPCSGGGGSGGGGSGGGGSRNLPVATPDPGMFPCLHHSQNLLRAVSNMLQKARQTLEFYPCTSEEIDHEDITKDKTSTVEACLPLELTKNESCLNSRETSFITNGSCLASRKTSFMMALCLSSIYEDLKMYQVEFKTMNAKLLMDPKRQIFLDQNMLAVIDELMQALNFNSETVPQKSSLEEPDFYKTKIKLCILLHAFRIRAVTIDRVMSYLNASGSSGISLIAALAVDYVIGMENAMPWNLPADLAWFKRNTLNKPVIMGRHTWESIGRPLPGRKNIILSSQPGTDDRVTWVKSVDEAIAACGDVPEIMVIGGGRVIEQFLPKAQKLYLTHIDAEVEGDTHFPDYEPDDWESVFSEFHDADAQNSHSYCFEILERR

SEQ ID NO: 1125 - protein, 1235 aa, Artificial Sequence
  Description of Artificial Sequence: Synthetic Construct
MALPVTALLLPLALLLHAARPDIQMTQTTSSLSASLGDRVTISCRASQDISKYLNWYQQKPDGTVKLLIYHTSRLHSGVPSRFSGSGSGTDYSLTISNLEQEDIATYFCQQGNTLPYTFGGGTKLEITGGGGSGGGGSGGGGSEVKLQESGPGLVAPSQSLSVTCTVSGVSLPDYGVSWIRQPPRKGLEWLGVIWGSETTYYNSALKSRLTIIKDNSKSQVFLKMNSLQTDDTAIYYCAKHYYYGGSYAMDYWGQGTSVTVSSTTTPAPRPPTPAPTIASQPLSLRPEACRPAAGGAVHTRGLDFACDIYIWAPLAGTCGVLLLSLVITLYCKRGRKKLLYIFKQPFMRPVQTTQEEDGCSCRFPEEEEGGCELRVKFSRSADAPAYKQGQNQLYNELNLGRREEYDVLDKRRGRDPEMGGKPRRKNPQEGLYNELQKDKMAEAYSEIGMKGERRRGKGHDGLYQGLSTATKDTYDALHMQALPPRGSATNFSLLKQAGDVEENPGPMCHQQLVISWFSLVFLASPLVAIWELKKDVYVVELDWYPDAPGEMVVLTCDTPEEDGITWTLDQSSEVLGSGKTLTIQVKEFGDAGQYTCHKGGEVLSHSLLLLHKKEDGIWSTDILKDQKEPKNKTFLRCEAKNYSGRFTCWWLTTISTDLTFSVKSSRGSSDPQGVTCGAATLSAERVRGDNKEYEYSVECQEDSACPAAEESLPIEVMVDAVHKLKYENYTSSFFIRDIIKPDPPKNLQLKPLKNSRQVEVSWEYPDTWSTPHSYFSLTFCVQVQGKSKREKKDRVFTDKTSATVICRKNASISVRAQDRYYSSSWSEWASVPCSGGGGSGGGGSGGGGSRNLPVATPDPGMFPCLHHSQNLLRAVSNMLQKARQTLEFYPCTSEEIDHEDITKDKTSTVEACLPLELTKNESCLNSRETSFITNGSCLASRKTSFMMALCLSSIYEDLKMYQVEFKTMNAKLLMDPKRQIFLDQNMLAVIDELMQALNFNSETVPQKSSLEEPDFYKTKIKLCILLHAFRIRAVTIDRVMSYLNASGSVGSLNCIVAVSQNMGVGKNGDLPWPPLRNEFRYFQRMTTTSSVEGKQNLVIMGKKTWFSIPEKNRPLKGRINLVLSRELKEPPQGAHFLSRSLDDALKLTEQPELANKVDMVWIVGGSSVYKEAMNHPGHLKLFVTRIMQDFESDTFFPEIDLEKYKLLPEYPGVLSDVQEEKGIKYKFEVYEKND

SEQ ID NO: 1126 - protein, 1235 aa, Artificial Sequence
  Description of Artificial Sequence: Synthetic Construct
MALPVTALLLPLALLLHAARPDIQMTQTTSSLSASLGDRVTISCRASQDISKYLNWYQQKPDGTVKLLIYHTSRLHSGVPSRFSGSGSGTDYSLTISNLEQEDIATYFCQQGNTLPYTFGGGTKLEITGGGGSGGGGSGGGGSEVKLQESGPGLVAPSQSLSVTCTVSGVSLPDYGVSWIRQPPRKGLEWLGVIWGSETTYYNSALKSRLTIIKDNSKSQVFLKMNSLQTDDTAIYYCAKHYYYGGSYAMDYWGQGTSVTVSSTTTPAPRPPTPAPTIASQPLSLRPEACRPAAGGAVHTRGLDFACDIYIWAPLAGTCGVLLLSLVITLYCKRGRKKLLYIFKQPFMRPVQTTQEEDGCSCRFPEEEEGGCELRVKFSRSADAPAYKQGQNQLYNELNLGRREEYDVLDKRRGRDPEMGGKPRRKNPQEGLYNELQKDKMAEAYSEIGMKGERRRGKGHDGLYQGLSTATKDTYDALHMQALPPRGSATNFSLLKQAGDVEENPGPMCHQQLVISWFSLVFLASPLVAIWELKKDVYVVELDWYPDAPGEMVVLTCDTPEEDGITWTLDQSSEVLGSGKTLTIQVKEFGDAGQYTCHKGGEVLSHSLLLLHKKEDGIWSTDILKDQKEPKNKTFLRCEAKNYSGRFTCWWLTTISTDLTFSVKSSRGSSDPQGVTCGAATLSAERVRGDNKEYEYSVECQEDSACPAAEESLPIEVMVDAVHKLKYENYTSSFFIRDIIKPDPPKNLQLKPLKNSRQVEVSWEYPDTWSTPHSYFSLTFCVQVQGKSKREKKDRVFTDKTSATVICRKNASISVRAQDRYYSSSWSEWASVPCSGGGGSGGGGSGGGGSRNLPVATPDPGMFPCLHHSQNLLRAVSNMLQKARQTLEFYPCTSEEIDHEDITKDKTSTVEACLPLELTKNESCLNSRETSFITNGSCLASRKTSFMMALCLSSIYEDLKMYQVEFKTMNAKLLMDPKRQIFLDQNMLAVIDELMQALNFNSETVPQKSSLEEPDFYKTKIKLCILLHAFRIRAVTIDRVMSYLNASGSVGSLNCIVAVSQNMGVGKNGDLPWPPLRNEFRYFQRMTTTSSVEGKQNLVIMGKKTWFSIPEKNRPLKGRINLVLSRELKEPPQGAHFLSRSLDDALKLTEQPELANKVDMVWIVGGSSVIKEAMNHPGHLKLFVTRIMQDFESDTFFPEIDLEKYKLLPEYPGVLSDVQEEKGIKYKFEVYEKND

SEQ ID NO: 1127 - protein, 1235 aa, Artificial Sequence
  Description of Artificial Sequence: Synthetic Construct
MALPVTALLLPLALLLHAARPDIQMTQTTSSLSASLGDRVTISCRASQDISKYLNWYQQKPDGTVKLLIYHTSRLHSGVPSRFSGSGSGTDYSLTISNLEQEDIATYFCQQGNTLPYTFGGGTKLEITGGGGSGGGGSGGGGSEVKLQESGPGLVAPSQSLSVTCTVSGVSLPDYGVSWIRQPPRKGLEWLGVIWGSETTYYNSALKSRLTIIKDNSKSQVFLKMNSLQTDDTAIYYCAKHYYYGGSYAMDYWGQGTSVTVSSTTTPAPRPPTPAPTIASQPLSLRPEACRPAAGGAVHTRGLDFACDIYIWAPLAGTCGVLLLSLVITLYCKRGRKKLLYIFKQPFMRPVQTTQEEDGCSCRFPEEEEGGCELRVKFSRSADAPAYKQGQNQLYNELNLGRREEYDVLDKRRGRDPEMGGKPRRKNPQEGLYNELQKDKMAEAYSEIGMKGERRRGKGHDGLYQGLSTATKDTYDALHMQALPPRGSATNFSLLKQAGDVEENPGPMCHQQLVISWFSLVFLASPLVAIWELKKDVYVVELDWYPDAPGEMVVLTCDTPEEDGITWTLDQSSEVLGSGKTLTIQVKEFGDAGQYTCHKGGEVLSHSLLLLHKKEDGIWSTDILKDQKEPKNKTFLRCEAKNYSGRFTCWWLTTISTDLTFSVKSSRGSSDPQGVTCGAATLSAERVRGDNKEYEYSVECQEDSACPAAEESLPIEVMVDAVHKLKYENYTSSFFIRDIIKPDPPKNLQLKPLKNSRQVEVSWEYPDTWSTPHSYFSLTFCVQVQGKSKREKKDRVFTDKTSATVICRKNASISVRAQDRYYSSSWSEWASVPCSGGGGSGGGGSGGGGSRNLPVATPDPGMFPCLHHSQNLLRAVSNMLQKARQTLEFYPCTSEEIDHEDITKDKTSTVEACLPLELTKNESCLNSRETSFITNGSCLASRKTSFMMALCLSSIYEDLKMYQVEFKTMNAKLLMDPKRQIFLDQNMLAVIDELMQALNFNSETVPQKSSLEEPDFYKTKIKLCILLHAFRIRAVTIDRVMSYLNASGSVGSLNCIVAVSQNMGIGKNGDLPWPPLRNEFRYFQRMTTTSSVEGKQNLVIMGKKTWFSIPEKNRPLKGRINLVLSRELKEPPQGAHFLSRSLDDALKLTEQPELANKVDMVWIVGGSSVIKEAMYHPGHLKLFVTRIMQDFESDTFFPEIDLEKYKLLPEYPGVLSDVQEEKGIKYKFEVYEKND

SEQ ID NO: 1128 - protein, 486 aa, Artificial Sequence; identical to SEQ ID NO: 475
  Description of Artificial Sequence: Synthetic Construct

SEQ ID NO: 1129 - protein, 542 aa, Artificial Sequence; identical to SEQ ID NO: 846
  Description of Artificial Sequence: Synthetic Construct

SEQ ID NO: 1130 - protein, 486 aa, Artificial Sequence; identical to SEQ ID NO: 475
  Description of Artificial Sequence: Synthetic Construct

SEQ ID NO: 1131 - protein, 731 aa, Artificial Sequence; identical to SEQ ID NO: 1121
  Description of Artificial Sequence: Synthetic Construct

SEQ ID NO: 1132 - protein, 486 aa, Artificial Sequence; identical to SEQ ID NO: 475
  Description of Artificial Sequence: Synthetic Construct

SEQ ID NO: 1133 - protein, 731 aa, Artificial Sequence
  Description of Artificial Sequence: Synthetic Construct
MCHQQLVISWFSLVFLASPLVAIWELKKDVYVVELDWYPDAPGEMVVLTCDTPEEDGITWTLDQSSEVLGSGKTLTIQVKEFGDAGQYTCHKGGEVLSHSLLLLHKKEDGIWSTDILKDQKEPKNKTFLRCEAKNYSGRFTCWWLTTISTDLTFSVKSSRGSSDPQGVTCGAATLSAERVRGDNKEYEYSVECQEDSACPAAEESLPIEVMVDAVHKLKYENYTSSFFIRDIIKPDPPKNLQLKPLKNSRQVEVSWEYPDTWSTPHSYFSLTFCVQVQGKSKREKKDRVFTDKTSATVICRKNASISVRAQDRYYSSSWSEWASVPCSGGGGSGGGGSGGGGSRNLPVATPDPGMFPCLHHSQNLLRAVSNMLQKARQTLEFYPCTSEEIDHEDITKDKTSTVEACLPLELTKNESCLNSRETSFITNGSCLASRKTSFMMALCLSSIYEDLKMYQVEFKTMNAKLLMDPKRQIFLDQNMLAVIDELMQALNFNSETVPQKSSLEEPDFYKTKIKLCILLHAFRIRAVTIDRVMSYLNASGGSGGVGSLNCIVAVSQNMGVGKNGDLPWPPLRNEFRYFQRMTTTSSVEGKQNLVIMGKKTWFSIPEKNRPLKGRINLVLSRELKEPPQGAHFLSRSLDDALKLTEQPELANKVDMVWIVGGSSVYKEAMNHPGHLKLFVTRIMQDFESDTFFPEIDLEKYKLLPEYPGVLSDVQEEKGIKYKFEVYEKND

SEQ ID NO: 1134 - protein, 486 aa, Artificial Sequence; identical to SEQ ID NO: 475
  Description of Artificial Sequence: Synthetic Construct

SEQ ID NO: 1135 - protein, 731 aa, Artificial Sequence
  Description of Artificial Sequence: Synthetic Construct
MCHQQLVISWFSLVFLASPLVAIWELKKDVYVVELDWYPDAPGEMVVLTCDTPEEDGITWTLDQSSEVLGSGKTLTIQVKEFGDAGQYTCHKGGEVLSHSLLLLHKKEDGIWSTDILKDQKEPKNKTFLRCEAKNYSGRFTCWWLTTISTDLTFSVKSSRGSSDPQGVTCGAATLSAERVRGDNKEYEYSVECQEDSACPAAEESLPIEVMVDAVHKLKYENYTSSFFIRDIIKPDPPKNLQLKPLKNSRQVEVSWEYPDTWSTPHSYFSLTFCVQVQGKSKREKKDRVFTDKTSATVICRKNASISVRAQDRYYSSSWSEWASVPCSGGGGSGGGGSGGGGSRNLPVATPDPGMFPCLHHSQNLLRAVSNMLQKARQTLEFYPCTSEEIDHEDITKDKTSTVEACLPLELTKNESCLNSRETSFITNGSCLASRKTSFMMALCLSSIYEDLKMYQVEFKTMNAKLLMDPKRQIFLDQNMLAVIDELMQALNFNSETVPQKSSLEEPDFYKTKIKLCILLHAFRIRAVTIDRVMSYLNASGGSGGVGSLNCIVAVSQNMGIGKNGDLPWPPLRNEFRYFQRMTTTSSVEGKQNLVIMGKKTWFSIPEKNRPLKGRINLVLSRELKEPPQGAHFLSRSLDDALKLTEQPELANKVDMVWIVGGSSVIKEAMNHPGHLKLFVTRIMQDFESDTFFPEIDLEKYKLLPEYPGVLSDVQEEKGIKYKFEVYEKND

SEQ ID NO: 1136 - protein, 486 aa, Artificial Sequence; identical to SEQ ID NO: 475
  Description of Artificial Sequence: Synthetic Construct

SEQ ID NO: 1137 - protein, 731 aa, Artificial Sequence
  Description of Artificial Sequence: Synthetic Construct
MCHQQLVISWFSLVFLASPLVAIWELKKDVYVVELDWYPDAPGEMVVLTCDTPEEDGITWTLDQSSEVLGSGKTLTIQVKEFGDAGQYTCHKGGEVLSHSLLLLHKKEDGIWSTDILKDQKEPKNKTFLRCEAKNYSGRFTCWWLTTISTDLTFSVKSSRGSSDPQGVTCGAATLSAERVRGDNKEYEYSVECQEDSACPAAEESLPIEVMVDAVHKLKYENYTSSFFIRDIIKPDPPKNLQLKPLKNSRQVEVSWEYPDTWSTPHSYFSLTFCVQVQGKSKREKKDRVFTDKTSATVICRKNASISVRAQDRYYSSSWSEWASVPCSGGGGSGGGGSGGGGSRNLPVATPDPGMFPCLHHSQNLLRAVSNMLQKARQTLEFYPCTSEEIDHEDITKDKTSTVEACLPLELTKNESCLNSRETSFITNGSCLASRKTSFMMALCLSSIYEDLKMYQVEFKTMNAKLLMDPKRQIFLDQNMLAVIDELMQALNFNSETVPQKSSLEEPDFYKTKIKLCILLHAFRIRAVTIDRVMSYLNASGGSGGVGSLNCIVAVSQNMGAGKNGDLPWPPLRNEFRYFQRMTTTSSVEGKQNLVIMGKKTWFSIPEKNRPLKGRINLVLSRELKEPPQGAHFLSRSLDDALKLTEQPELANKVDMVWIVGGSSVYKEAMNHPGHLKLFVTRIMQDFESDTFFPEIDLEKYKLLPEYPGVLSDVQEEKGIKYKFEVYEKND

SEQ ID NO: 1138 - protein, 486 aa, Artificial Sequence; identical to SEQ ID NO: 475
  Description of Artificial Sequence: Synthetic Construct

SEQ ID NO: 1139 - protein, 731 aa, Artificial Sequence
  Description of Artificial Sequence: Synthetic Construct
MCHQQLVISWFSLVFLASPLVAIWELKKDVYVVELDWYPDAPGEMVVLTCDTPEEDGITWTLDQSSEVLGSGKTLTIQVKEFGDAGQYTCHKGGEVLSHSLLLLHKKEDGIWSTDILKDQKEPKNKTFLRCEAKNYSGRFTCWWLTTISTDLTFSVKSSRGSSDPQGVTCGAATLSAERVRGDNKEYEYSVECQEDSACPAAEESLPIEVMVDAVHKLKYENYTSSFFIRDIIKPDPPKNLQLKPLKNSRQVEVSWEYPDTWSTPHSYFSLTFCVQVQGKSKREKKDRVFTDKTSATVICRKNASISVRAQDRYYSSSWSEWASVPCSGGGGSGGGGSGGGGSRNLPVATPDPGMFPCLHHSQNLLRAVSNMLQKARQTLEFYPCTSEEIDHEDITKDKTSTVEACLPLELTKNESCLNSRETSFITNGSCLASRKTSFMMALCLSSIYEDLKMYQVEFKTMNAKLLMDPKRQIFLDQNMLAVIDELMQALNFNSETVPQKSSLEEPDFYKTKIKLCILLHAFRIRAVTIDRVMSYLNASGGSGGVGSLNCIVAVSQNMGVGKNGDLPWPPLRNEFRYFQRMTTTSSVEGKQNLVIMGKKTWFSIPEKNRPLKGRINLVLSRELKEPPQGAHFLSRSLDDALKLTEQPELANKVDMVWIVGGSSVIKEAMNHPGHLKLFVTRIMQDFESDTFFPEIDLEKYKLLPEYPGVLSDVQEEKGIKYKFEVYEKND

SEQ ID NO: 1140 - protein, 486 aa, Artificial Sequence; identical to SEQ ID NO: 475
  Description of Artificial Sequence: Synthetic Construct

SEQ ID NO: 1141 - protein, 731 aa, Artificial Sequence
  Description of Artificial Sequence: Synthetic Construct
MCHQQLVISWFSLVFLASPLVAIWELKKDVYVVELDWYPDAPGEMVVLTCDTPEEDGITWTLDQSSEVLGSGKTLTIQVKEFGDAGQYTCHKGGEVLSHSLLLLHKKEDGIWSTDILKDQKEPKNKTFLRCEAKNYSGRFTCWWLTTISTDLTFSVKSSRGSSDPQGVTCGAATLSAERVRGDNKEYEYSVECQEDSACPAAEESLPIEVMVDAVHKLKYENYTSSFFIRDIIKPDPPKNLQLKPLKNSRQVEVSWEYPDTWSTPHSYFSLTFCVQVQGKSKREKKDRVFTDKTSATVICRKNASISVRAQDRYYSSSWSEWASVPCSGGGGSGGGGSGGGGSRNLPVATPDPGMFPCLHHSQNLLRAVSNMLQKARQTLEFYPCTSEEIDHEDITKDKTSTVEACLPLELTKNESCLNSRETSFITNGSCLASRKTSFMMALCLSSIYEDLKMYQVEFKTMNAKLLMDPKRQIFLDQNMLAVIDELMQALNFNSETVPQKSSLEEPDFYKTKIKLCILLHAFRIRAVTIDRVMSYLNASGGSGGVGSLNCIVAVSQNMGAGKNGDLPWPPLRNEFRYFQRMTTTSSVEGKQNLVIMGKKTWFSIPEKNRPLKGRINLVLSRELKEPPQGAHFLSRSLDDALKLTEQPELANKVDMVWIVGGSSVIKEAMNHPGHLKLFVTRIMQDFESDTFFPEIDLEKYKLLPEYPGVLSDVQEEKGIKYKFEVYEKND

SEQ ID NO: 1142 - protein, 903 aa, Artificial Sequence; identical to SEQ ID NO: 817
  Description of Artificial Sequence: Synthetic Construct

SEQ ID NO: 1143 - DNA, 4276 bp, Artificial Sequence
  Description of Artificial Sequence: Synthetic Construct
atggccttaccagtgaccgccttgctcctgccgctggccttgctgctccacgccgccaggccggacatccagatgacacagactacatcctccctgtctgcctctctgggagacagagtcaccatcagttgcagggcaagtcaggacattagtaaatatttaaattggtatcagcagaaaccagatggaactgttaaactcctgatctaccatacatcaagattacactcaggagtcccatcaaggttcagtggcagtgggtctggaacagattattctctcaccattagcaacctggagcaagaagatattgccacttacttttgccaacagggtaatacgcttccgtacacgttcggaggggggaccaagctggagatcacaggtggcggtggctcgggcggtggtgggtcgggtggcggcggatctgaggtgaaactgcaggagtcaggacctggcctggtggcgccctcacagagcctgtccgtcacatgcactgtctcaggggtctcattacccgactatggtgtaagctggattcgccagcctccacgaaagggtctggagtggctgggagtaatatggggtagtgaaaccacatactataattcagctctcaaatccagactgaccatcatcaaggacaactccaagagccaagttttcttaaaaatgaacagtctgcaaactgatgacacagccatttactactgtgccaaacattattactacggtggtagctatgctatggactactggggccaaggaacctcagtcaccgtctcctcaaccacgacgccagcgccgcgaccaccaacaccggcgcccaccatcgcgtcgcagcccctgtccctgcgcccagaggcgtgccggccagcggcggggggcgcagtgcacacgagggggctggacttcgcctgtgatatctacatctgggcgcccttggccgggacttgtggggtccttctcctgtcactggttatcaccctttactgcaaacggggcagaaagaaactcctgtatatattcaaacaaccatttatgagaccagtacaaactactcaagaggaagatggctgtagctgccgatttccagaagaagaagaaggaggatgtgaactgagagtgaagttcagcaggagcgcagacgcccccgcgtacaagcagggccagaaccagctctataacgagctcaatctaggacgaagagaggagtacgatgttttggacaagagacgtggccgggaccctgagatggggggaaagccgagaaggaagaaccctcaggaaggcctgtacaatgaactgcagaaagataagatggcggaggcctacagtgagattgggatgaaaggcgagcgccggaggggcaaggggcacgatggcctttaccagggtctcagtacagccaccaaggacacctacgacgcccttcacatgcaggccctgccccctcgctaaatcgggctagccgcccctctccctcccccccccctaacgttactggccgaagccgcttggaataaggccggtgtgcgtttgtctatatgttattttccaccatattgccgtcttttggcaatgtgagggcccggaaacctggccctgtcttcttgacgagcattcctaggggtctttcccctctcgccaaaggaatgcaaggtctgttgaatgtcgtgaaggaagcagttcctctggaagcttcttgaagacaaacaacgtctgtagcgaccctttgcaggcagcggaaccccccacctggcgacaggtgcctctgcggccaaaagccacgtgtataagatacacctgcaaaggcggcacaaccccagtgccacgttgtgagttggatagttgtggaaagagtcaaatggctctcctcaagcgtattcaacaaggggctgaaggatgcccagaaggtaccccattgtatgggatctgatctggggcctcggtgcacatgctttacatgtgtttagtcgaggttaaaaaaacgtctaggccccccgaaccacggggacgtggttttcctttgaaaaacacgatgataagcttgccacaacccacaaggagacgaccttccatgtgccaccaacagctcgtgatcagctggttctccctggtgttcctggctagccccctggtggccatctgggagctcaagaaagacgtgtacgtggtggaactggactggtaccccgacgcccctggcgaaatggtggtgctgacatgcgacacccctgaggaggatggcattacctggaccctcgatcagagctccgaggtgctgggcagcggcaaaaccctgaccatccaggtgaaggagtttggcgatgccggccagtacacatgtcacaagggcggcgaggtgctgagccactccctgctgctgctccacaagaaggaagatggcatctggagcaccgacattctgaaggatcagaaggagcccaagaacaagacattcctgaggtgtgaggccaagaactacagcggcaggtttacctgctggtggctgacaacaatcagcaccgacctcacattctccgtcaagtcctccaggggttcttccgaccctcaaggcgtgacatgcggcgctgccaccctgagcgctgagagagtcaggggcgacaacaaggagtacgagtacagcgtcgaatgtcaggaggacagcgcctgtcccgccgctgaagagagcctgcctatcgaggtgatggtggacgccgtgcacaaactgaagtatgagaattacacctccagcttcttcatcagggacatcatcaaacccgatccccccaagaacctgcagctgaagcctctgaagaacagcagacaggtcgaagtgtcctgggagtaccctgatacctggtccacaccccacagctacttcagcctgaccttttgcgtgcaggtgcagggcaagagcaaaagggagaagaaggacagggtgtttaccgacaagacctccgccacagtgatttgcagaaagaacgcctccatcagcgtgagggcccaggacaggtattacagcagctcctggagcgaatgggctagcgtgccctgtagcggaggaggaggcagcggaggaggaggttctggaggaggcggcagcagaaacctgcctgtcgctacccccgaccccggaatgttcccctgcctgcaccactcccagaacctcctgagggccgtgtccaacatgctgcagaaggctagacagaccctcgaattctacccctgtaccagcgaggagatcgaccatgaggacatcaccaaggataagaccagcaccgtggaggcttgcctgcctctggagctgaccaaaaacgagagctgcctgaacagcagggaaaccagcttcattaccaacggctcctgcctggcctccaggaagacatccttcatgatggccctgtgcctcagcagcatctacgaggacctgaagatgtatcaggtggagtttaagaccatgaatgccaagctgctgatggaccctaagaggcagatcttcctggaccagaatatgctggccgtgattgacgagctgatgcaggccctcaactttaacagcgagaccgtgccccagaaaagcagcctcgaagagcctgacttctacaaaaccaagattaagctgtgtatcctgctgcacgccttcaggatcagggccgtgaccatcgacagggtgatgagctacctgaacgccagcggtggatccggaggagttggttcgctaaactgcatcgtcgctgtgtcccagaacatgggcatcggcaagaacggggacctgccctggccaccgctcaggaatgaattcagatatttccagagaatgaccacaacctcttcagtagaaggtaaacagaatctggtgattatgggtaagaagacctggttctccattcctgagaagaatcgacctttaaagggtagaattaatttagttctcagcagagaactcaaggaacctccacaaggagctcattttctttccagaagtctagatgatgccttaaaacttactgaacaaccagaattagcaaataaagtagacatggtctggatagttggtggcagttctgttattaaggaagccatgtatcacccaggccatcttaaactatttgtgacaaggatcatgcaagactttgaaagtgacacgttttttccagaaattgatttggagaaatataaacttctgccagaatacccaggtgttctctctgatgtccaggaggagaaaggcattaagtacaaatttgaagtatatgagaagaatgattaa

SEQ ID NO: 1144 - DNA, 1461 bp, Artificial Sequence; identical to SEQ ID NO: 835
  Description of Artificial Sequence: Synthetic Construct

SEQ ID NO: 1145 - DNA, 2196 bp, Artificial Sequence
  Description of Artificial Sequence: Synthetic Construct
atgtgccaccaacagctcgtgatcagctggttctccctggtgttcctggctagccccctggtggccatctgggagctcaagaaagacgtgtacgtggtggaactggactggtaccccgacgcccctggcgaaatggtggtgctgacatgcgacacccctgaggaggatggcattacctggaccctcgatcagagctccgaggtgctgggcagcggcaaaaccctgaccatccaggtgaaggagtttggcgatgccggccagtacacatgtcacaagggcggcgaggtgctgagccactccctgctgctgctccacaagaaggaagatggcatctggagcaccgacattctgaaggatcagaaggagcccaagaacaagacattcctgaggtgtgaggccaagaactacagcggcaggtttacctgctggtggctgacaacaatcagcaccgacctcacattctccgtcaagtcctccaggggttcttccgaccctcaaggcgtgacatgcggcgctgccaccctgagcgctgagagagtcaggggcgacaacaaggagtacgagtacagcgtcgaatgtcaggaggacagcgcctgtcccgccgctgaagagagcctgcctatcgaggtgatggtggacgccgtgcacaaactgaagtatgagaattacacctccagcttcttcatcagggacatcatcaaacccgatccccccaagaacctgcagctgaagcctctgaagaacagcagacaggtcgaagtgtcctgggagtaccctgatacctggtccacaccccacagctacttcagcctgaccttttgcgtgcaggtgcagggcaagagcaaaagggagaagaaggacagggtgtttaccgacaagacctccgccacagtgatttgcagaaagaacgcctccatcagcgtgagggcccaggacaggtattacagcagctcctggagcgaatgggctagcgtgccctgtagcggaggaggaggcagcggaggaggaggttctggaggaggcggcagcagaaacctgcctgtcgctacccccgaccccggaatgttcccctgcctgcaccactcccagaacctcctgagggccgtgtccaacatgctgcagaaggctagacagaccctcgaattctacccctgtaccagcgaggagatcgaccatgaggacatcaccaaggataagaccagcaccgtggaggcttgcctgcctctggagctgaccaaaaacgagagctgcctgaacagcagggaaaccagcttcattaccaacggctcctgcctggcctccaggaagacatccttcatgatggccctgtgcctcagcagcatctacgaggacctgaagatgtatcaggtggagtttaagaccatgaatgccaagctgctgatggaccctaagaggcagatcttcctggaccagaatatgctggccgtgattgacgagctgatgcaggccctcaactttaacagcgagaccgtgccccagaaaagcagcctcgaagagcctgacttctacaaaaccaagattaagctgtgtatcctgctgcacgccttcaggatcagggccgtgaccatcgacagggtgatgagctacctgaacgccagcggtggatccggaggagttggttcgctaaactgcatcgtcgctgtgtcccagaacatgggcatcggcaagaacggggacctgccctggccaccgctcaggaatgaattcagatatttccagagaatgaccacaacctcttcagtagaaggtaaacagaatctggtgattatgggtaagaagacctggttctccattcctgagaagaatcgacctttaaagggtagaattaatttagttctcagcagagaactcaaggaacctccacaaggagctcattttctttccagaagtctagatgatgccttaaaacttactgaacaaccagaattagcaaataaagtagacatggtctggatagttggtggcagttctgttattaaggaagccatgtatcacccaggccatcttaaactatttgtgacaaggatcatgcaagactttgaaagtgacacgttttttccagaaattgatttggagaaatataaacttctgccagaatacccaggtgttctctctgatgtccaggaggagaaaggcattaagtacaaatttgaagtatatgagaagaatgattaa

SEQ ID NO: 1146 - DNA, 4189 bp, Artificial Sequence
  Description of Artificial Sequence: Synthetic Construct
atggccttaccagtgaccgccttgctcctgccgctggccttgctgctccacgccgccaggccggacatccagatgacacagactacatcctccctgtctgcctctctgggagacagagtcaccatcagttgcagggcaagtcaggacattagtaaatatttaaattggtatcagcagaaaccagatggaactgttaaactcctgatctaccatacatcaagattacactcaggagtcccatcaaggttcagtggcagtgggtctggaacagattattctctcaccattagcaacctggagcaagaagatattgccacttacttttgccaacagggtaatacgcttccgtacacgttcggaggggggaccaagctggagatcacaggtggcggtggctcgggcggtggtgggtcgggtggcggcggatctgaggtgaaactgcaggagtcaggacctggcctggtggcgccctcacagagcctgtccgtcacatgcactgtctcaggggtctcattacccgactatggtgtaagctggattcgccagcctccacgaaagggtctggagtggctgggagtaatatggggtagtgaaaccacatactataattcagctctcaaatccagactgaccatcatcaaggacaactccaagagccaagttttcttaaaaatgaacagtctgcaaactgatgacacagccatttactactgtgccaaacattattactacggtggtagctatgctatggactactggggccaaggaacctcagtcaccgtctcctcaaccacgacgccagcgccgcgaccaccaacaccggcgcccaccatcgcgtcgcagcccctgtccctgcgcccagaggcgtgccggccagcggcggggggcgcagtgcacacgagggggctggacttcgcctgtgatatctacatctgggcgcccttggccgggacttgtggggtccttctcctgtcactggttatcaccctttactgcaaacggggcagaaagaaactcctgtatatattcaaacaaccatttatgagaccagtacaaactactcaagaggaagatggctgtagctgccgatttccagaagaagaagaaggaggatgtgaactgagagtgaagttcagcaggagcgcagacgcccccgcgtacaagcagggccagaaccagctctataacgagctcaatctaggacgaagagaggagtacgatgttttggacaagagacgtggccgggaccctgagatggggggaaagccgagaaggaagaaccctcaggaaggcctgtacaatgaactgcagaaagataagatggcggaggcctacagtgagattgggatgaaaggcgagcgccggaggggcaaggggcacgatggcctttaccagggtctcagtacagccaccaaggacacctacgacgcccttcacatgcaggccctgccccctcgctaaatcgggctagccgcccctctccctcccccccccctaacgttactggccgaagccgcttggaataaggccggtgtgcgtttgtctatatgttattttccaccatattgccgtcttttggcaatgtgagggcccggaaacctggccctgtcttcttgacgagcattcctaggggtctttcccctctcgccaaaggaatgcaaggtctgttgaatgtcgtgaaggaagcagttcctctggaagcttcttgaagacaaacaacgtctgtagcgaccctttgcaggcagcggaaccccccacctggcgacaggtgcctctgcggccaaaagccacgtgtataagatacacctgcaaaggcggcacaaccccagtgccacgttgtgagttggatagttgtggaaagagtcaaatggctctcctcaagcgtattcaacaaggggctgaaggatgcccagaaggtaccccattgtatgggatctgatctggggcctcggtgcacatgctttacatgtgtttagtcgaggttaaaaaaacgtctaggccccccgaaccacggggacgtggttttcctttgaaaaacacgatgataagcttgccacaacccacaaggagacgaccttccatgtgccaccaacagctcgtgatcagctggttctccctggtgttcctggctagccccctggtggccatctgggagctcaagaaagacgtgtacgtggtggaactggactggtaccccgacgcccctggcgaaatggtggtgctgacatgcgacacccctgaggaggatggcattacctggaccctcgatcagagctccgaggtgctgggcagcggcaaaaccctgaccatccaggtgaaggagtttggcgatgccggccagtacacatgtcacaagggcggcgaggtgctgagccactccctgctgctgctccacaagaaggaagatggcatctggagcaccgacattctgaaggatcagaaggagcccaagaacaagacattcctgaggtgtgaggccaagaactacagcggcaggtttacctgctggtggctgacaacaatcagcaccgacctcacattctccgtcaagtcctccaggggttcttccgaccctcaaggcgtgacatgcggcgctgccaccctgagcgctgagagagtcaggggcgacaacaaggagtacgagtacagcgtcgaatgtcaggaggacagcgcctgtcccgccgctgaagagagcctgcctatcgaggtgatggtggacgccgtgcacaaactgaagtatgagaattacacctccagcttcttcatcagggacatcatcaaacccgatccccccaagaacctgcagctgaagcctctgaagaacagcagacaggtcgaagtgtcctgggagtaccctgatacctggtccacaccccacagctacttcagcctgaccttttgcgtgcaggtgcagggcaagagcaaaagggagaagaaggacagggtgtttaccgacaagacctccgccacagtgatttgcagaaagaacgcctccatcagcgtgagggcccaggacaggtattacagcagctcctggagcgaatgggctagcgtgccctgtagcggaggaggaggcagcggaggaggaggttctggaggaggcggcagcagaaacctgcctgtcgctacccccgaccccggaatgttcccctgcctgcaccactcccagaacctcctgagggccgtgtccaacatgctgcagaaggctagacagaccctcgaattctacccctgtaccagcgaggagatcgaccatgaggacatcaccaaggataagaccagcaccgtggaggcttgcctgcctctggagctgaccaaaaacgagagctgcctgaacagcagggaaaccagcttcattaccaacggctcctgcctggcctccaggaagacatccttcatgatggccctgtgcctcagcagcatctacgaggacctgaagatgtatcaggtggagtttaagaccatgaatgccaagctgctgatggaccctaagaggcagatcttcctggaccagaatatgctggccgtgattgacgagctgatgcaggccctcaactttaacagcgagaccgtgccccagaaaagcagcctcgaagagcctgacttctacaaaaccaagattaagctgtgtatcctgctgcacgccttcaggatcagggccgtgaccatcgacagggtgatgagctacctgaacgccagcggatccagcggcatctctctgattgcggcgctggcagttgactacgttattggcatggaaaacgcgatgccatggaacctcccggctgacctggcgtggttcaaacgtaacaccctgaacaaacctgtgatcatgggtcgtcacacctgggaatctattggccgtcctctcccgggtcgtaaaaacatcattctgtcttctcagccaggcaccgacgaccgtgttacctgggttaaaagcgttgacgaagcgattgctgcgtgcggtgatgttcctgaaattatggtgatcggcggtggccgtgttatcgaacagttcctgccgaaagcgcagaaactgtacctgacccacatcgacgcggaagttgaaggtgacacccacttcccggactacgaaccggatgattgggagagcgtattctccgaattccatgatgcggatgcgcaaaactctcattcttactgttttgaaatcctggaacgtcgttaa

SEQ ID NO: 1147 - DNA, 1461 bp, Artificial Sequence; identical to SEQ ID NO: 835
  Description of Artificial Sequence: Synthetic Construct

SEQ ID NO: 1148 - DNA, 2109 bp, Artificial Sequence
  Description of Artificial Sequence: Synthetic Construct
atgtgccaccaacagctcgtgatcagctggttctccctggtgttcctggctagccccctggtggccatctgggagctcaagaaagacgtgtacgtggtggaactggactggtaccccgacgcccctggcgaaatggtggtgctgacatgcgacacccctgaggaggatggcattacctggaccctcgatcagagctccgaggtgctgggcagcggcaaaaccctgaccatccaggtgaaggagtttggcgatgccggccagtacacatgtcacaagggcggcgaggtgctgagccactccctgctgctgctccacaagaaggaagatggcatctggagcaccgacattctgaaggatcagaaggagcccaagaacaagacattcctgaggtgtgaggccaagaactacagcggcaggtttacctgctggtggctgacaacaatcagcaccgacctcacattctccgtcaagtcctccaggggttcttccgaccctcaaggcgtgacatgcggcgctgccaccctgagcgctgagagagtcaggggcgacaacaaggagtacgagtacagcgtcgaatgtcaggaggacagcgcctgtcccgccgctgaagagagcctgcctatcgaggtgatggtggacgccgtgcacaaactgaagtatgagaattacacctccagcttcttcatcagggacatcatcaaacccgatccccccaagaacctgcagctgaagcctctgaagaacagcagacaggtcgaagtgtcctgggagtaccctgatacctggtccacaccccacagctacttcagcctgaccttttgcgtgcaggtgcagggcaagagcaaaagggagaagaaggacagggtgtttaccgacaagacctccgccacagtgatttgcagaaagaacgcctccatcagcgtgagggcccaggacaggtattacagcagctcctggagcgaatgggctagcgtgccctgtagcggaggaggaggcagcggaggaggaggttctggaggaggcggcagcagaaacctgcctgtcgctacccccgaccccggaatgttcccctgcctgcaccactcccagaacctcctgagggccgtgtccaacatgctgcagaaggctagacagaccctcgaattctacccctgtaccagcgaggagatcgaccatgaggacatcaccaaggataagaccagcaccgtggaggcttgcctgcctctggagctgaccaaaaacgagagctgcctgaacagcagggaaaccagcttcattaccaacggctcctgcctggcctccaggaagacatccttcatgatggccctgtgcctcagcagcatctacgaggacctgaagatgtatcaggtggagtttaagaccatgaatgccaagctgctgatggaccctaagaggcagatcttcctggaccagaatatgctggccgtgattgacgagctgatgcaggccctcaactttaacagcgagaccgtgccccagaaaagcagcctcgaagagcctgacttctacaaaaccaagattaagctgtgtatcctgctgcacgccttcaggatcagggccgtgaccatcgacagggtgatgagctacctgaacgccagcggatccagcggcatctctctgattgcggcgctggcagttgactacgttattggcatggaaaacgcgatgccatggaacctcccggctgacctggcgtggttcaaacgtaacaccctgaacaaacctgtgatcatgggtcgtcacacctgggaatctattggccgtcctctcccgggtcgtaaaaacatcattctgtcttctcagccaggcaccgacgaccgtgttacctgggttaaaagcgttgacgaagcgattgctgcgtgcggtgatgttcctgaaattatggtgatcggcggtggccgtgttatcgaacagttcctgccgaaagcgcagaaactgtacctgacccacatcgacgcggaagttgaaggtgacacccacttcccggactacgaaccggatgattgggagagcgtattctccgaattccatgatgcggatgcgcaaaactctcattcttactgttttgaaatcctggaacgtcgttaa

SEQ ID NO: 1149 - DNA, 3630 bp, Artificial Sequence
  Description of Artificial Sequence: Synthetic Construct
atggccttaccagtgaccgccttgctcctgccgctggccttgctgctccacgccgccaggccggacatccagatgacacagactacatcctccctgtctgcctctctgggagacagagtcaccatcagttgcagggcaagtcaggacattagtaaatatttaaattggtatcagcagaaaccagatggaactgttaaactcctgatctaccatacatcaagattacactcaggagtcccatcaaggttcagtggcagtgggtctggaacagattattctctcaccattagcaacctggagcaagaagatattgccacttacttttgccaacagggtaatacgcttccgtacacgttcggaggggggaccaagctggagatcacaggtggcggtggctcgggcggtggtgggtcgggtggcggcggatctgaggtgaaactgcaggagtcaggacctggcctggtggcgccctcacagagcctgtccgtcacatgcactgtctcaggggtctcattacccgactatggtgtaagctggattcgccagcctccacgaaagggtctggagtggctgggagtaatatggggtagtgaaaccacatactataattcagctctcaaatccagactgaccatcatcaaggacaactccaagagccaagttttcttaaaaatgaacagtctgcaaactgatgacacagccatttactactgtgccaaacattattactacggtggtagctatgctatggactactggggccaaggaacctcagtcaccgtctcctcaaccacgacgccagcgccgcgaccaccaacaccggcgcccaccatcgcgtcgcagcccctgtccctgcgcccagaggcgtgccggccagcggcggggggcgcagtgcacacgagggggctggacttcgcctgtgatatctacatctgggcgcccttggccgggacttgtggggtccttctcctgtcactggttatcaccctttactgcaaacggggcagaaagaaactcctgtatatattcaaacaaccatttatgagaccagtacaaactactcaagaggaagatggctgtagctgccgatttccagaagaagaagaaggaggatgtgaactgagagtgaagttcagcaggagcgcagacgcccccgcgtacaagcagggccagaaccagctctataacgagctcaatctaggacgaagagaggagtacgatgttttggacaagagacgtggccgggaccctgagatggggggaaagccgagaaggaagaaccctcaggaaggcctgtacaatgaactgcagaaagataagatggcggaggcctacagtgagattgggatgaaaggcgagcgccggaggggcaaggggcacgatggcctttaccagggtctcagtacagccaccaaggacacctacgacgcccttcacatgcaggccctgccccctcgcggatcagctactaacttcagcctgctgaagcaggctggagacgtggaggagaaccctggacctatgtgccaccaacagctcgtgatcagctggttctccctggtgttcctggctagccccctggtggccatctgggagctcaagaaagacgtgtacgtggtggaactggactggtaccccgacgcccctggcgaaatggtggtgctgacatgcgacacccctgaggaggatggcattacctggaccctcgatcagagctccgaggtgctgggcagcggcaaaaccctgaccatccaggtgaaggagtttggcgatgccggccagtacacatgtcacaagggcggcgaggtgctgagccactccctgctgctgctccacaagaaggaagatggcatctggagcaccgacattctgaaggatcagaaggagcccaagaacaagacattcctgaggtgtgaggccaagaactacagcggcaggtttacctgctggtggctgacaacaatcagcaccgacctcacattctccgtcaagtcctccaggggttcttccgaccctcaaggcgtgacatgcggcgctgccaccctgagcgctgagagagtcaggggcgacaacaaggagtacgagtacagcgtcgaatgtcaggaggacagcgcctgtcccgccgctgaagagagcctgcctatcgaggtgatggtggacgccgtgcacaaactgaagtatgagaattacacctccagcttcttcatcagggacatcatcaaacccgatccccccaagaacctgcagctgaagcctctgaagaacagcagacaggtcgaagtgtcctgggagtaccctgatacctggtccacaccccacagctacttcagcctgaccttttgcgtgcaggtgcagggcaagagcaaaagggagaagaaggacagggtgtttaccgacaagacctccgccacagtgatttgcagaaagaacgcctccatcagcgtgagggcccaggacaggtattacagcagctcctggagcgaatgggctagcgtgccctgtagcggaggaggaggcagcggaggaggaggttctggaggaggcggcagcagaaacctgcctgtcgctacccccgaccccggaatgttcccctgcctgcaccactcccagaacctcctgagggccgtgtccaacatgctgcagaaggctagacagaccctcgaattctacccctgtaccagcgaggagatcgaccatgaggacatcaccaaggataagaccagcaccgtggaggcttgcctgcctctggagctgaccaaaaacgagagctgcctgaacagcagggaaaccagcttcattaccaacggctcctgcctggcctccaggaagacatccttcatgatggccctgtgcctcagcagcatctacgaggacctgaagatgtatcaggtggagtttaagaccatgaatgccaagctgctgatggaccctaagaggcagatcttcctggaccagaatatgctggccgtgattgacgagctgatgcaggccctcaactttaacagcgagaccgtgccccagaaaagcagcctcgaagagcctgacttctacaaaaccaagattaagctgtgtatcctgctgcacgccttcaggatcagggccgtgaccatcgacagggtgatgagctacctgaacgccagcggatcctcagggatctcacttatcgcagccttggcagttgattatgtgatcggcatggaaaatgcgatgccatggaatcttccggccgacctcgcttggttcaaacgcaacaccctgaacaaacccgttattatgggccgacatacatgggaaagtatcggcaggccattgcccggtcggaaaaacataatcctttcctcccagccgggcacggacgatagagtgacttgggtcaaatcagttgacgaggccattgctgcctgcggcgatgtacccgagattatggttatcggaggggggcgagttattgagcagtttctgcccaaagcgcagaagttgtaccttactcatatagatgcagaggtagagggcgacacgcatttccccgactacgaaccggatgattgggaatccgtattttccgaattccacgacgcggatgcccaaaacagtcactcttactgttttgaaattcttgagcgacgctga

SEQ ID NO: 1150 - DNA, 3708 bp, Artificial Sequence
  Description of Artificial Sequence: Synthetic Construct
atggccttaccagtgaccgccttgctcctgccgctggccttgctgctccacgccgccaggccggacatccagatgacacagactacatcctccctgtctgcctctctgggagacagagtcaccatcagttgcagggcaagtcaggacattagtaaatatttaaattggtatcagcagaaaccagatggaactgttaaactcctgatctaccatacatcaagattacactcaggagtcccatcaaggttcagtggcagtgggtctggaacagattattctctcaccattagcaacctggagcaagaagatattgccacttacttttgccaacagggtaatacgcttccgtacacgttcggaggggggaccaagctggagatcacaggtggcggtggctcgggcggtggtgggtcgggtggcggcggatctgaggtgaaactgcaggagtcaggacctggcctggtggcgccctcacagagcctgtccgtcacatgcactgtctcaggggtctcattacccgactatggtgtaagctggattcgccagcctccacgaaagggtctggagtggctgggagtaatatggggtagtgaaaccacatactataattcagctctcaaatccagactgaccatcatcaaggacaactccaagagccaagttttcttaaaaatgaacagtctgcaaactgatgacacagccatttactactgtgccaaacattattactacggtggtagctatgctatggactactggggccaaggaacctcagtcaccgtctcctcaaccacgacgccagcgccgcgaccaccaacaccggcgcccaccatcgcgtcgcagcccctgtccctgcgcccagaggcgtgccggccagcggcggggggcgcagtgcacacgagggggctggacttcgcctgtgatatctacatctgggcgcccttggccgggacttgtggggtccttctcctgtcactggttatcaccctttactgcaaacggggcagaaagaaactcctgtatatattcaaacaaccatttatgagaccagtacaaactactcaagaggaagatggctgtagctgccgatttccagaagaagaagaaggaggatgtgaactgagagtgaagttcagcaggagcgcagacgcccccgcgtacaagcagggccagaaccagctctataacgagctcaatctaggacgaagagaggagtacgatgttttggacaagagacgtggccgggaccctgagatggggggaaagccgagaaggaagaaccctcaggaaggcctgtacaatgaactgcagaaagataagatggcggaggcctacagtgagattgggatgaaaggcgagcgccggaggggcaaggggcacgatggcctttaccagggtctcagtacagccaccaaggacacctacgacgcccttcacatgcaggccctgccccctcgcggatcagctactaacttcagcctgctgaagcaggctggagacgtggaggagaaccctggacctatgtgccaccaacagctcgtgatcagctggttctccctggtgttcctggctagccccctggtggccatctgggagctcaagaaagacgtgtacgtggtggaactggactggtaccccgacgcccctggcgaaatggtggtgctgacatgcgacacccctgaggaggatggcattacctggaccctcgatcagagctccgaggtgctgggcagcggcaaaaccctgaccatccaggtgaaggagtttggcgatgccggccagtacacatgtcacaagggcggcgaggtgctgagccactccctgctgctgctccacaagaaggaagatggcatctggagcaccgacattctgaaggatcagaaggagcccaagaacaagacattcctgaggtgtgaggccaagaactacagcggcaggtttacctgctggtggctgacaacaatcagcaccgacctcacattctccgtcaagtcctccaggggttcttccgaccctcaaggcgtgacatgcggcgctgccaccctgagcgctgagagagtcaggggcgacaacaaggagtacgagtacagcgtcgaatgtcaggaggacagcgcctgtcccgccgctgaagagagcctgcctatcgaggtgatggtggacgccgtgcacaaactgaagtatgagaattacacctccagcttcttcatcagggacatcatcaaacccgatccccccaagaacctgcagctgaagcctctgaagaacagcagacaggtcgaagtgtcctgggagtaccctgatacctggtccacaccccacagctacttcagcctgaccttttgcgtgcaggtgcagggcaagagcaaaagggagaagaaggacagggtgtttaccgacaagacctccgccacagtgatttgcagaaagaacgcctccatcagcgtgagggcccaggacaggtattacagcagctcctggagcgaatgggctagcgtgccctgtagcggaggaggaggcagcggaggaggaggttctggaggaggcggcagcagaaacctgcctgtcgctacccccgaccccggaatgttcccctgcctgcaccactcccagaacctcctgagggccgtgtccaacatgctgcagaaggctagacagaccctcgaattctacccctgtaccagcgaggagatcgaccatgaggacatcaccaaggataagaccagcaccgtggaggcttgcctgcctctggagctgaccaaaaacgagagctgcctgaacagcagggaaaccagcttcattaccaacggctcctgcctggcctccaggaagacatccttcatgatggccctgtgcctcagcagcatctacgaggacctgaagatgtatcaggtggagtttaagaccatgaatgccaagctgctgatggaccctaagaggcagatcttcctggaccagaatatgctggccgtgattgacgagctgatgcaggccctcaactttaacagcgagaccgtgccccagaaaagcagcctcgaagagcctgacttctacaaaaccaagattaagctgtgtatcctgctgcacgccttcaggatcagggccgtgaccatcgacagggtgatgagctacctgaacgccagcggatccgttggttcgctaaactgcatcgtcgctgtgtcccagaacatgggcgtcggcaagaacggggacctgccctggccaccgctcaggaatgaattcagatatttccagagaatgaccacaacctcttcagtagaaggtaaacagaatctggtgattatgggtaagaagacctggttctccattcctgagaagaatcgacctttaaagggtagaattaatttagttctcagcagagaactcaaggaacctccacaaggagctcattttctttccagaagtctagatgatgccttaaaacttactgaacaaccagaattagcaaataaagtagacatggtctggatagttggtggcagttctgtttataaggaagccatgaatcacccaggccatcttaaactatttgtgacaaggatcatgcaagactttgaaagtgacacgttttttccagaaattgatttggagaaatataaacttctgccagaatacccaggtgttctctctgatgtccaggaggagaaaggcattaagtacaaatttgaagtatatgagaagaatgattaa

SEQ ID NO: 1151 - DNA, 3708 bp, Artificial Sequence
  Description of Artificial Sequence: Synthetic Construct
atggccttaccagtgaccgccttgctcctgccgctggccttgctgctccacgccgccaggccggacatccagatgacacagactacatcctccctgtctgcctctctgggagacagagtcaccatcagttgcagggcaagtcaggacattagtaaatatttaaattggtatcagcagaaaccagatggaactgttaaactcctgatctaccatacatcaagattacactcaggagtcccatcaaggttcagtggcagtgggtctggaacagattattctctcaccattagcaacctggagcaagaagatattgccacttacttttgccaacagggtaatacgcttccgtacacgttcggaggggggaccaagctggagatcacaggtggcggtggctcgggcggtggtgggtcgggtggcggcggatctgaggtgaaactgcaggagtcaggacctggcctggtggcgccctcacagagcctgtccgtcacatgcactgtctcaggggtctcattacccgactatggtgtaagctggattcgccagcctccacgaaagggtctggagtggctgggagtaatatggggtagtgaaaccacatactataattcagctctcaaatccagactgaccatcatcaaggacaactccaagagccaagttttcttaaaaatgaacagtctgcaaactgatgacacagccatttactactgtgccaaacattattactacggtggtagctatgctatggactactggggccaaggaacctcagtcaccgtctcctcaaccacgacgccagcgccgcgaccaccaacaccggcgcccaccatcgcgtcgcagcccctgtccctgcgcccagaggcgtgccggccagcggcggggggcgcagtgcacacgagggggctggacttcgcctgtgatatctacatctgggcgcccttggccgggacttgtggggtccttctcctgtcactggttatcaccctttactgcaaacggggcagaaagaaactcctgtatatattcaaacaaccatttatgagaccagtacaaactactcaagaggaagatggctgtagctgccgatttccagaagaagaagaaggaggatgtgaactgagagtgaagttcagcaggagcgcagacgcccccgcgtacaagcagggccagaaccagctctataacgagctcaatctaggacgaagagaggagtacgatgttttggacaagagacgtggccgggaccctgagatggggggaaagccgagaaggaagaaccctcaggaaggcctgtacaatgaactgcagaaagataagatggcggaggcctacagtgagattgggatgaaaggcgagcgccggaggggcaaggggcacgatggcctttaccagggtctcagtacagccaccaaggacacctacgacgcccttcacatgcaggccctgccccctcgcggatcagctactaacttcagcctgctgaagcaggctggagacgtggaggagaaccctggacctatgtgccaccaacagctcgtgatcagctggttctccctggtgttcctggctagccccctggtggccatctgggagctcaagaaagacgtgtacgtggtggaactggactggtaccccgacgcccctggcgaaatggtggtgctgacatgcgacacccctgaggaggatggcattacctggaccctcgatcagagctccgaggtgctgggcagcggcaaaaccctgaccatccaggtgaaggagtttggcgatgccggccagtacacatgtcacaagggcggcgaggtgctgagccactccctgctgctgctccacaagaaggaagatggcatctggagcaccgacattctgaaggatcagaaggagcccaagaacaagacattcctgaggtgtgaggccaagaactacagcggcaggtttacctgctggtggctgacaacaatcagcaccgacctcacattctccgtcaagtcctccaggggttcttccgaccctcaaggcgtgacatgcggcgctgccaccctgagcgctgagagagtcaggggcgacaacaaggagtacgagtacagcgtcgaatgtcaggaggacagcgcctgtcccgccgctgaagagagcctgcctatcgaggtgatggtggacgccgtgcacaaactgaagtatgagaattacacctccagcttcttcatcagggacatcatcaaacccgatccccccaagaacctgcagctgaagcctctgaagaacagcagacaggtcgaagtgtcctgggagtaccctgatacctggtccacaccccacagctacttcagcctgaccttttgcgtgcaggtgcagggcaagagcaaaagggagaagaaggacagggtgtttaccgacaagacctccgccacagtgatttgcagaaagaacgcctccatcagcgtgagggcccaggacaggtattacagcagctcctggagcgaatgggctagcgtgccctgtagcggaggaggaggcagcggaggaggaggttctggaggaggcggcagcagaaacctgcctgtcgctacccccgaccccggaatgttcccctgcctgcaccactcccagaacctcctgagggccgtgtccaacatgctgcagaaggctagacagaccctcgaattctacccctgtaccagcgaggagatcgaccatgaggacatcaccaaggataagaccagcaccgtggaggcttgcctgcctctggagctgaccaaaaacgagagctgcctgaacagcagggaaaccagcttcattaccaacggctcctgcctggcctccaggaagacatccttcatgatggccctgtgcctcagcagcatctacgaggacctgaagatgtatcaggtggagtttaagaccatgaatgccaagctgctgatggaccctaagaggcagatcttcctggaccagaatatgctggccgtgattgacgagctgatgcaggccctcaactttaacagcgagaccgtgccccagaaaagcagcctcgaagagcctgacttctacaaaaccaagattaagctgtgtatcctgctgcacgccttcaggatcagggccgtgaccatcgacagggtgatgagctacctgaacgccagcggatccgttggttcgctaaactgcatcgtcgctgtgtcccagaacatgggcgtcggcaagaacggggacctgccctggccaccgctcaggaatgaattcagatatttccagagaatgaccacaacctcttcagtagaaggtaaacagaatctggtgattatgggtaagaagacctggttctccattcctgagaagaatcgacctttaaagggtagaattaatttagttctcagcagagaactcaaggaacctccacaaggagctcattttctttccagaagtctagatgatgccttaaaacttactgaacaaccagaattagcaaataaagtagacatggtctggatagttggtggcagttctgttattaaggaagccatgaatcacccaggccatcttaaactatttgtgacaaggatcatgcaagactttgaaagtgacacgttttttccagaaattgatttggagaaatataaacttctgccagaatacccaggtgttctctctgatgtccaggaggagaaaggcattaagtacaaatttgaagtatatgagaagaatgattaa

SEQ ID NO: 1152 - DNA, 3708 bp, Artificial Sequence
  Description of Artificial Sequence: Synthetic Construct
atggccttaccagtgaccgccttgctcctgccgctggccttgctgctccacgccgccaggccggacatccagatgacacagactacatcctccctgtctgcctctctgggagacagagtcaccatcagttgcagggcaagtcaggacattagtaaatatttaaattggtatcagcagaaaccagatggaactgttaaactcctgatctaccatacatcaagattacactcaggagtcccatcaaggttcagtggcagtgggtctggaacagattattctctcaccattagcaacctggagcaagaagatattgccacttacttttgccaacagggtaatacgcttccgtacacgttcggaggggggaccaagctggagatcacaggtggcggtggctcgggcggtggtgggtcgggtggcggcggatctgaggtgaaactgcaggagtcaggacctggcctggtggcgccctcacagagcctgtccgtcacatgcactgtctcaggggtctcattacccgactatggtgtaagctggattcgccagcctccacgaaagggtctggagtggctgggagtaatatggggtagtgaaaccacatactataattcagctctcaaatccagactgaccatcatcaaggacaactccaagagccaagttttcttaaaaatgaacagtctgcaaactgatgacacagccatttactactgtgccaaacattattactacggtggtagctatgctatggactactggggccaaggaacctcagtcaccgtctcctcaaccacgacgccagcgccgcgaccaccaacaccggcgcccaccatcgcgtcgcagcccctgtccctgcgcccagaggcgtgccggccagcggcggggggcgcagtgcacacgagggggctggacttcgcctgtgatatctacatctgggcgcccttggccgggacttgtggggtccttctcctgtcactggttatcaccctttactgcaaacggggcagaaagaaactcctgtatatattcaaacaaccatttatgagaccagtacaaactactcaagaggaagatggctgtagctgccgatttccagaagaagaagaaggaggatgtgaactgagagtgaagttcagcaggagcgcagacgcccccgcgtacaagcagggccagaaccagctctataacgagctcaatctaggacgaagagaggagtacgatgttttggacaagagacgtggccgggaccctgagatggggggaaagccgagaaggaagaaccctcaggaaggcctgtacaatgaactgcagaaagataagatggcggaggcctacagtgagattgggatgaaaggcgagcgccggaggggcaaggggcacgatggcctttaccagggtctcagtacagccaccaaggacacctacgacgcccttcacatgcaggccctgccccctcgcggatcagctactaacttcagcctgctgaagcaggctggagacgtggaggagaaccctggacctatgtgccaccaacagctcgtgatcagctggttctccctggtgttcctggctagccccctggtggccatctgggagctcaagaaagacgtgtacgtggtggaactggactggtaccccgacgcccctggcgaaatggtggtgctgacatgcgacacccctgaggaggatggcattacctggaccctcgatcagagctccgaggtgctgggcagcggcaaaaccctgaccatccaggtgaaggagtttggcgatgccggccagtacacatgtcacaagggcggcgaggtgctgagccactccctgctgctgctccacaagaaggaagatggcatctggagcaccgacattctgaaggatcagaaggagcccaagaacaagacattcctgaggtgtgaggccaagaactacagcggcaggtttacctgctggtggctgacaacaatcagcaccgacctcacattctccgtcaagtcctccaggggttcttccgaccctcaaggcgtgacatgcggcgctgccaccctgagcgctgagagagtcaggggcgacaacaaggagtacgagtacagcgtcgaatgtcaggaggacagcgcctgtcccgccgctgaagagagcctgcctatcgaggtgatggtggacgccgtgcacaaactgaagtatgagaattacacctccagcttcttcatcagggacatcatcaaacccgatccccccaagaacctgcagctgaagcctctgaagaacagcagacaggtcgaagtgtcctgggagtaccctgatacctggtccacaccccacagctacttcagcctgaccttttgcgtgcaggtgcagggcaagagcaaaagggagaagaaggacagggtgtttaccgacaagacctccgccacagtgatttgcagaaagaacgcctccatcagcgtgagggcccaggacaggtattacagcagctcctggagcgaatgggctagcgtgccctgtagcggaggaggaggcagcggaggaggaggttctggaggaggcggcagcagaaacctgcctgtcgctacccccgaccccggaatgttcccctgcctgcaccactcccagaacctcctgagggccgtgtccaacatgctgcagaaggctagacagaccctcgaattctacccctgtaccagcgaggagatcgaccatgaggacatcaccaaggataagaccagcaccgtggaggcttgcctgcctctggagctgaccaaaaacgagagctgcctgaacagcagggaaaccagcttcattaccaacggctcctgcctggcctccaggaagacatccttcatgatggccctgtgcctcagcagcatctacgaggacctgaagatgtatcaggtggagtttaagaccatgaatgccaagctgctgatggaccctaagaggcagatcttcctggaccagaatatgctggccgtgattgacgagctgatgcaggccctcaactttaacagcgagaccgtgccccagaaaagcagcctcgaagagcctgacttctacaaaaccaagattaagctgtgtatcctgctgcacgccttcaggatcagggccgtgaccatcgacagggtgatgagctacctgaacgccagcggatccgttggttcgctaaactgcatcgtcgctgtgtcccagaacatgggcatcggcaagaacggggacctgccctggccaccgctcaggaatgaattcagatatttccagagaatgaccacaacctcttcagtagaaggtaaacagaatctggtgattatgggtaagaagacctggttctccattcctgagaagaatcgacctttaaagggtagaattaatttagttctcagcagagaactcaaggaacctccacaaggagctcattttctttccagaagtctagatgatgccttaaaacttactgaacaaccagaattagcaaataaagtagacatggtctggatagttggtggcagttctgttattaaggaagccatgtatcacccaggccatcttaaactatttgtgacaaggatcatgcaagactttgaaagtgacacgttttttccagaaattgatttggagaaatataaacttctgccagaatacccaggtgttctctctgatgtccaggaggagaaaggcattaagtacaaatttgaagtatatgagaagaatgattaa

SEQ ID NO: 1153 - DNA, 4276 bp, Artificial Sequence
  Description of Artificial Sequence: Synthetic Construct
atggccttaccagtgaccgccttgctcctgccgctggccttgctgctccacgccgccaggccggacatccagatgacacagactacatcctccctgtctgcctctctgggagacagagtcaccatcagttgcagggcaagtcaggacattagtaaatatttaaattggtatcagcagaaaccagatggaactgttaaactcctgatctaccatacatcaagattacactcaggagtcccatcaaggttcagtggcagtgggtctggaacagattattctctcaccattagcaacctggagcaagaagatattgccacttacttttgccaacagggtaatacgcttccgtacacgttcggaggggggaccaagctggagatcacaggtggcggtggctcgggcggtggtgggtcgggtggcggcggatctgaggtgaaactgcaggagtcaggacctggcctggtggcgccctcacagagcctgtccgtcacatgcactgtctcaggggtctcattacccgactatggtgtaagctggattcgccagcctccacgaaagggtctggagtggctgggagtaatatggggtagtgaaaccacatactataattcagctctcaaatccagactgaccatcatcaaggacaactccaagagccaagttttcttaaaaatgaacagtctgcaaactgatgacacagccatttactactgtgccaaacattattactacggtggtagctatgctatggactactggggccaaggaacctcagtcaccgtctcctcaaccacgacgccagcgccgcgaccaccaacaccggcgcccaccatcgcgtcgcagcccctgtccctgcgcccagaggcgtgccggccagcggcggggggcgcagtgcacacgagggggctggacttcgcctgtgatatctacatctgggcgcccttggccgggacttgtggggtccttctcctgtcactggttatcaccctttactgcaaacggggcagaaagaaactcctgtatatattcaaacaaccatttatgagaccagtacaaactactcaagaggaagatggctgtagctgccgatttccagaagaagaagaaggaggatgtgaactgagagtgaagttcagcaggagcgcagacgcccccgcgtacaagcagggccagaaccagctctataacgagctcaatctaggacgaagagaggagtacgatgttttggacaagagacgtggccgggaccctgagatggggggaaagccgagaaggaagaaccctcaggaaggcctgtacaatgaactgcagaaagataagatggcggaggcctacagtgagattgggatgaaaggcgagcgccggaggggcaaggggcacgatggcctttaccagggtctcagtacagccaccaaggacacctacgacgcccttcacatgcaggccctgccccctcgctaaatcgggctagccgcccctctccctcccccccccctaacgttactggccgaagccgcttggaataaggccggtgtgcgtttgtctatatgttattttccaccatattgccgtcttttggcaatgtgagggcccggaaacctggccctgtcttcttgacgagcattcctaggggtctttcccctctcgccaaaggaatgcaaggtctgttgaatgtcgtgaaggaagcagttcctctggaagcttcttgaagacaaacaacgtctgtagcgaccctttgcaggcagcggaaccccccacctggcgacaggtgcctctgcggccaaaagccacgtgtataagatacacctgcaaaggcggcacaaccccagtgccacgttgtgagttggatagttgtggaaagagtcaaatggctctcctcaagcgtattcaacaaggggctgaaggatgcccagaaggtaccccattgtatgggatctgatctggggcctcggtgcacatgctttacatgtgtttagtcgaggttaaaaaaacgtctaggccccccgaaccacggggacgtggttttcctttgaaaaacacgatgataagcttgccacaacccacaaggagacgaccttccatgtgccaccaacagctcgtgatcagctggttctccctggtgttcctggctagccccctggtggccatctgggagctcaagaaagacgtgtacgtggtggaactggactggtaccccgacgcccctggcgaaatggtggtgctgacatgcgacacccctgaggaggatggcattacctggaccctcgatcagagctccgaggtgctgggcagcggcaaaaccctgaccatccaggtgaaggagtttggcgatgccggccagtacacatgtcacaagggcggcgaggtgctgagccactccctgctgctgctccacaagaaggaagatggcatctggagcaccgacattctgaaggatcagaaggagcccaagaacaagacattcctgaggtgtgaggccaagaactacagcggcaggtttacctgctggtggctgacaacaatcagcaccgacctcacattctccgtcaagtcctccaggggttcttccgaccctcaaggcgtgacatgcggcgctgccaccctgagcgctgagagagtcaggggcgacaacaaggagtacgagtacagcgtcgaatgtcaggaggacagcgcctgtcccgccgctgaagagagcctgcctatcgaggtgatggtggacgccgtgcacaaactgaagtatgagaattacacctccagcttcttcatcagggacatcatcaaacccgatccccccaagaacctgcagctgaagcctctgaagaacagcagacaggtcgaagtgtcctgggagtaccctgatacctggtccacaccccacagctacttcagcctgaccttttgcgtgcaggtgcagggcaagagcaaaagggagaagaaggacagggtgtttaccgacaagacctccgccacagtgatttgcagaaagaacgcctccatcagcgtgagggcccaggacaggtattacagcagctcctggagcgaatgggctagcgtgccctgtagcggaggaggaggcagcggaggaggaggttctggaggaggcggcagcagaaacctgcctgtcgctacccccgaccccggaatgttcccctgcctgcaccactcccagaacctcctgagggccgtgtccaacatgctgcagaaggctagacagaccctcgaattctacccctgtaccagcgaggagatcgaccatgaggacatcaccaaggataagaccagcaccgtggaggcttgcctgcctctggagctgaccaaaaacgagagctgcctgaacagcagggaaaccagcttcattaccaacggctcctgcctggcctccaggaagacatccttcatgatggccctgtgcctcagcagcatctacgaggacctgaagatgtatcaggtggagtttaagaccatgaatgccaagctgctgatggaccctaagaggcagatcttcctggaccagaatatgctggccgtgattgacgagctgatgcaggccctcaactttaacagcgagaccgtgccccagaaaagcagcctcgaagagcctgacttctacaaaaccaagattaagctgtgtatcctgctgcacgccttcaggatcagggccgtgaccatcgacagggtgatgagctacctgaacgccagcggtggatccggaggagttggttcgctaaactgcatcgtcgctgtgtcccagaacatgggcgtcggcaagaacggggacctgccctggccaccgctcaggaatgaattcagatatttccagagaatgaccacaacctcttcagtagaaggtaaacagaatctggtgattatgggtaagaagacctggttctccattcctgagaagaatcgacctttaaagggtagaattaatttagttctcagcagagaactcaaggaacctccacaaggagctcattttctttccagaagtctagatgatgccttaaaacttactgaacaaccagaattagcaaataaagtagacatggtctggatagttggtggcagttctgtttataaggaagccatgaatcacccaggccatcttaaactatttgtgacaaggatcatgcaagactttgaaagtgacacgttttttccagaaattgatttggagaaatataaacttctgccagaatacccaggtgttctctctgatgtccaggaggagaaaggcattaagtacaaatttgaagtatatgagaagaatgattaa

SEQ ID NO: 1154 - DNA, 1461 bp, Artificial Sequence; identical to SEQ ID NO: 835
  Description of Artificial Sequence: Synthetic Construct

SEQ ID NO: 1155 - DNA, 2196 bp, Artificial Sequence
  Description of Artificial Sequence: Synthetic Construct
atgtgccaccaacagctcgtgatcagctggttctccctggtgttcctggctagccccctggtggccatctgggagctcaagaaagacgtgtacgtggtggaactggactggtaccccgacgcccctggcgaaatggtggtgctgacatgcgacacccctgaggaggatggcattacctggaccctcgatcagagctccgaggtgctgggcagcggcaaaaccctgaccatccaggtgaaggagtttggcgatgccggccagtacacatgtcacaagggcggcgaggtgctgagccactccctgctgctgctccacaagaaggaagatggcatctggagcaccgacattctgaaggatcagaaggagcccaagaacaagacattcctgaggtgtgaggccaagaactacagcggcaggtttacctgctggtggctgacaacaatcagcaccgacctcacattctccgtcaagtcctccaggggttcttccgaccctcaaggcgtgacatgcggcgctgccaccctgagcgctgagagagtcaggggcgacaacaaggagtacgagtacagcgtcgaatgtcaggaggacagcgcctgtcccgccgctgaagagagcctgcctatcgaggtgatggtggacgccgtgcacaaactgaagtatgagaattacacctccagcttcttcatcagggacatcatcaaacccgatccccccaagaacctgcagctgaagcctctgaagaacagcagacaggtcgaagtgtcctgggagtaccctgatacctggtccacaccccacagctacttcagcctgaccttttgcgtgcaggtgcagggcaagagcaaaagggagaagaaggacagggtgtttaccgacaagacctccgccacagtgatttgcagaaagaacgcctccatcagcgtgagggcccaggacaggtattacagcagctcctggagcgaatgggctagcgtgccctgtagcggaggaggaggcagcggaggaggaggttctggaggaggcggcagcagaaacctgcctgtcgctacccccgaccccggaatgttcccctgcctgcaccactcccagaacctcctgagggccgtgtccaacatgctgcagaaggctagacagaccctcgaattctacccctgtaccagcgaggagatcgaccatgaggacatcaccaaggataagaccagcaccgtggaggcttgcctgcctctggagctgaccaaaaacgagagctgcctgaacagcagggaaaccagcttcattaccaacggctcctgcctggcctccaggaagacatccttcatgatggccctgtgcctcagcagcatctacgaggacctgaagatgtatcaggtggagtttaagaccatgaatgccaagctgctgatggaccctaagaggcagatcttcctggaccagaatatgctggccgtgattgacgagctgatgcaggccctcaactttaacagcgagaccgtgccccagaaaagcagcctcgaagagcctgacttctacaaaaccaagattaagctgtgtatcctgctgcacgccttcaggatcagggccgtgaccatcgacagggtgatgagctacctgaacgccagcggtggatccggaggagttggttcgctaaactgcatcgtcgctgtgtcccagaacatgggcgtcggcaagaacggggacctgccctggccaccgctcaggaatgaattcagatatttccagagaatgaccacaacctcttcagtagaaggtaaacagaatctggtgattatgggtaagaagacctggttctccattcctgagaagaatcgacctttaaagggtagaattaatttagttctcagcagagaactcaaggaacctccacaaggagctcattttctttccagaagtctagatgatgccttaaaacttactgaacaaccagaattagcaaataaagtagacatggtctggatagttggtggcagttctgtttataaggaagccatgaatcacccaggccatcttaaactatttgtgacaaggatcatgcaagactttgaaagtgacacgttttttccagaaattgatttggagaaatataaacttctgccagaatacccaggtgttctctctgatgtccaggaggagaaaggcattaagtacaaatttgaagtatatgagaagaatgattaa

SEQ ID NO: 1156 - DNA, 4276 bp, Artificial Sequence
  Description of Artificial Sequence: Synthetic Construct
atggccttaccagtgaccgccttgctcctgccgctggccttgctgctccacgccgccaggccggacatccagatgacacagactacatcctccctgtctgcctctctgggagacagagtcaccatcagttgcagggcaagtcaggacattagtaaatatttaaattggtatcagcagaaaccagatggaactgttaaactcctgatctaccatacatcaagattacactcaggagtcccatcaaggttcagtggcagtgggtctggaacagattattctctcaccattagcaacctggagcaagaagatattgccacttacttttgccaacagggtaatacgcttccgtacacgttcggaggggggaccaagctggagatcacaggtggcggtggctcgggcggtggtgggtcgggtggcggcggatctgaggtgaaactgcaggagtcaggacctggcctggtggcgccctcacagagcctgtccgtcacatgcactgtctcaggggtctcattacccgactatggtgtaagctggattcgccagcctccacgaaagggtctggagtggctgggagtaatatggggtagtgaaaccacatactataattcagctctcaaatccagactgaccatcatcaaggacaactccaagagccaagttttcttaaaaatgaacagtctgcaaactgatgacacagccatttactactgtgccaaacattattactacggtggtagctatgctatggactactggggccaaggaacctcagtcaccgtctcctcaaccacgacgccagcgccgcgaccaccaacaccggcgcccaccatcgcgtcgcagcccctgtccctgcgcccagaggcgtgccggccagcggcggggggcgcagtgcacacgagggggctggacttcgcctgtgatatctacatctgggcgcccttggccgggacttgtggggtccttctcctgtcactggttatcaccctttactgcaaacggggcagaaagaaactcctgtatatattcaaacaaccatttatgagaccagtacaaactactcaagaggaagatggctgtagctgccgatttccagaagaagaagaaggaggatgtgaactgagagtgaagttcagcaggagcgcagacgcccccgcgtacaagcagggccagaaccagctctataacgagctcaatctaggacgaagagaggagtacgatgttttggacaagagacgtggccgggaccctgagatggggggaaagccgagaaggaagaaccctcaggaaggcctgtacaatgaactgcagaaagataagatggcggaggcctacagtgagattgggatgaaaggcgagcgccggaggggcaaggggcacgatggcctttaccagggtctcagtacagccaccaaggacacctacgacgcccttcacatgcaggccctgccccctcgctaaatcgggctagccgcccctctccctcccccccccctaacgttactggccgaagccgcttggaataaggccggtgtgcgtttgtctatatgttattttccaccatattgccgtcttttggcaatgtgagggcccggaaacctggccctgtcttcttgacgagcattcctaggggtctttcccctctcgccaaaggaatgcaaggtctgttgaatgtcgtgaaggaagcagttcctctggaagcttcttgaagacaaacaacgtctgtagcgaccctttgcaggcagcggaaccccccacctggcgacaggtgcctctgcggccaaaagccacgtgtataagatacacctgcaaaggcggcacaaccccagtgccacgttgtgagttggatagttgtggaaagagtcaaatggctctcctcaagcgtattcaacaaggggctgaaggatgcccagaaggtaccccattgtatgggatctgatctggggcctcggtgcacatgctttacatgtgtttagtcgaggttaaaaaaacgtctaggccccccgaaccacggggacgtggttttcctttgaaaaacacgatgataagcttgccacaacccacaaggagacgaccttccatgtgccaccaacagctcgtgatcagctggttctccctggtgttcctggctagccccctggtggccatctgggagctcaagaaagacgtgtacgtggtggaactggactggtaccccgacgcccctggcgaaatggtggtgctgacatgcgacacccctgaggaggatggcattacctggaccctcgatcagagctccgaggtgctgggcagcggcaaaaccctgaccatccaggtgaaggagtttggcgatgccggccagtacacatgtcacaagggcggcgaggtgctgagccactccctgctgctgctccacaagaaggaagatggcatctggagcaccgacattctgaaggatcagaaggagcccaagaacaagacattcctgaggtgtgaggccaagaactacagcggcaggtttacctgctggtggctgacaacaatcagcaccgacctcacattctccgtcaagtcctccaggggttcttccgaccctcaaggcgtgacatgcggcgctgccaccctgagcgctgagagagtcaggggcgacaacaaggagtacgagtacagcgtcgaatgtcaggaggacagcgcctgtcccgccgctgaagagagcctgcctatcgaggtgatggtggacgccgtgcacaaactgaagtatgagaattacacctccagcttcttcatcagggacatcatcaaacccgatccccccaagaacctgcagctgaagcctctgaagaacagcagacaggtcgaagtgtcctgggagtaccctgatacctggtccacaccccacagctacttcagcctgaccttttgcgtgcaggtgcagggcaagagcaaaagggagaagaaggacagggtgtttaccgacaagacctccgccacagtgatttgcagaaagaacgcctccatcagcgtgagggcccaggacaggtattacagcagctcctggagcgaatgggctagcgtgccctgtagcggaggaggaggcagcggaggaggaggttctggaggaggcggcagcagaaacctgcctgtcgctacccccgaccccggaatgttcccctgcctgcaccactcccagaacctcctgagggccgtgtccaacatgctgcagaaggctagacagaccctcgaattctacccctgtaccagcgaggagatcgaccatgaggacatcaccaaggataagaccagcaccgtggaggcttgcctgcctctggagctgaccaaaaacgagagctgcctgaacagcagggaaaccagcttcattaccaacggctcctgcctggcctccaggaagacatccttcatgatggccctgtgcctcagcagcatctacgaggacctgaagatgtatcaggtggagtttaagaccatgaatgccaagctgctgatggaccctaagaggcagatcttcctggaccagaatatgctggccgtgattgacgagctgatgcaggccctcaactttaacagcgagaccgtgccccagaaaagcagcctcgaagagcctgacttctacaaaaccaagattaagctgtgtatcctgctgcacgccttcaggatcagggccgtgaccatcgacagggtgatgagctacctgaacgccagcggtggatccggaggagttggttcgctaaactgcatcgtggccgtgagccagaacatgggcatcggcaagaatggcgacctgccttggccacctctgaggaacgagttcagatactttcagaggatgaccacaaccagctccgtggagggcaagcagaacctggtcatcatgggcaagaagacatggttctctatccccgagaagaaccgccctctgaagggccggatcaatctggtgctgagcagagagctgaaggagccaccacagggagcacacttcctgagccggagcctggacgatgccctgaagctgaccgagcagcccgagctggccaacaaggtggacatggtgtggatcgtgggcggctctagcgtgatcaaggaggccatgaatcacccaggccacctgaagctgttcgtgacaagaatcatgcaggactttgagtccgataccttctttcccgagatcgacctggagaagtacaagctgctgcctgagtatccaggcgtgctgtctgatgtgcaggaggagaagggcatcaagtacaagttcgaggtgtatgagaagaatgattaa

SEQ ID NO: 1157 - DNA, 1461 bp, Artificial Sequence; identical to SEQ ID NO: 835
  Description of Artificial Sequence: Synthetic Construct

SEQ ID NO: 1158 - DNA, 2196 bp, Artificial Sequence
  Description of Artificial Sequence: Synthetic Construct
atgtgccaccaacagctcgtgatcagctggttctccctggtgttcctggctagccccctggtggccatctgggagctcaagaaagacgtgtacgtggtggaactggactggtaccccgacgcccctggcgaaatggtggtgctgacatgcgacacccctgaggaggatggcattacctggaccctcgatcagagctccgaggtgctgggcagcggcaaaaccctgaccatccaggtgaaggagtttggcgatgccggccagtacacatgtcacaagggcggcgaggtgctgagccactccctgctgctgctccacaagaaggaagatggcatctggagcaccgacattctgaaggatcagaaggagcccaagaacaagacattcctgaggtgtgaggccaagaactacagcggcaggtttacctgctggtggctgacaacaatcagcaccgacctcacattctccgtcaagtcctccaggggttcttccgaccctcaaggcgtgacatgcggcgctgccaccctgagcgctgagagagtcaggggcgacaacaaggagtacgagtacagcgtcgaatgtcaggaggacagcgcctgtcccgccgctgaagagagcctgcctatcgaggtgatggtggacgccgtgcacaaactgaagtatgagaattacacctccagcttcttcatcagggacatcatcaaacccgatccccccaagaacctgcagctgaagcctctgaagaacagcagacaggtcgaagtgtcctgggagtaccctgatacctggtccacaccccacagctacttcagcctgaccttttgcgtgcaggtgcagggcaagagcaaaagggagaagaaggacagggtgtttaccgacaagacctccgccacagtgatttgcagaaagaacgcctccatcagcgtgagggcccaggacaggtattacagcagctcctggagcgaatgggctagcgtgccctgtagcggaggaggaggcagcggaggaggaggttctggaggaggcggcagcagaaacctgcctgtcgctacccccgaccccggaatgttcccctgcctgcaccactcccagaacctcctgagggccgtgtccaacatgctgcagaaggctagacagaccctcgaattctacccctgtaccagcgaggagatcgaccatgaggacatcaccaaggataagaccagcaccgtggaggcttgcctgcctctggagctgaccaaaaacgagagctgcctgaacagcagggaaaccagcttcattaccaacggctcctgcctggcctccaggaagacatccttcatgatggccctgtgcctcagcagcatctacgaggacctgaagatgtatcaggtggagtttaagaccatgaatgccaagctgctgatggaccctaagaggcagatcttcctggaccagaatatgctggccgtgattgacgagctgatgcaggccctcaactttaacagcgagaccgtgccccagaaaagcagcctcgaagagcctgacttctacaaaaccaagattaagctgtgtatcctgctgcacgccttcaggatcagggccgtgaccatcgacagggtgatgagctacctgaacgccagcggtggatccggaggagttggttcgctaaactgcatcgtggccgtgagccagaacatgggcatcggcaagaatggcgacctgccttggccacctctgaggaacgagttcagatactttcagaggatgaccacaaccagctccgtggagggcaagcagaacctggtcatcatgggcaagaagacatggttctctatccccgagaagaaccgccctctgaagggccggatcaatctggtgctgagcagagagctgaaggagccaccacagggagcacacttcctgagccggagcctggacgatgccctgaagctgaccgagcagcccgagctggccaacaaggtggacatggtgtggatcgtgggcggctctagcgtgatcaaggaggccatgaatcacccaggccacctgaagctgttcgtgacaagaatcatgcaggactttgagtccgataccttctttcccgagatcgacctggagaagtacaagctgctgcctgagtatccaggcgtgctgtctgatgtgcaggaggagaagggcatcaagtacaagttcgaggtgtatgagaagaatgattaa

SEQ ID NO: 1159 - DNA, 4276 bp, Artificial Sequence
  Description of Artificial Sequence: Synthetic Construct
atggccttaccagtgaccgccttgctcctgccgctggccttgctgctccacgccgccaggccggacatccagatgacacagactacatcctccctgtctgcctctctgggagacagagtcaccatcagttgcagggcaagtcaggacattagtaaatatttaaattggtatcagcagaaaccagatggaactgttaaactcctgatctaccatacatcaagattacactcaggagtcccatcaaggttcagtggcagtgggtctggaacagattattctctcaccattagcaacctggagcaagaagatattgccacttacttttgccaacagggtaatacgcttccgtacacgttcggaggggggaccaagctggagatcacaggtggcggtggctcgggcggtggtgggtcgggtggcggcggatctgaggtgaaactgcaggagtcaggacctggcctggtggcgccctcacagagcctgtccgtcacatgcactgtctcaggggtctcattacccgactatggtgtaagctggattcgccagcctccacgaaagggtctggagtggctgggagtaatatggggtagtgaaaccacatactataattcagctctcaaatccagactgaccatcatcaaggacaactccaagagccaagttttcttaaaaatgaacagtctgcaaactgatgacacagccatttactactgtgccaaacattattactacggtggtagctatgctatggactactggggccaaggaacctcagtcaccgtctcctcaaccacgacgccagcgccgcgaccaccaacaccggcgcccaccatcgcgtcgcagcccctgtccctgcgcccagaggcgtgccggccagcggcggggggcgcagtgcacacgagggggctggacttcgcctgtgatatctacatctgggcgcccttggccgggacttgtggggtccttctcctgtcactggttatcaccctttactgcaaacggggcagaaagaaactcctgtatatattcaaacaaccatttatgagaccagtacaaactactcaagaggaagatggctgtagctgccgatttccagaagaagaagaaggaggatgtgaactgagagtgaagttcagcaggagcgcagacgcccccgcgtacaagcagggccagaaccagctctataacgagctcaatctaggacgaagagaggagtacgatgttttggacaagagacgtggccgggaccctgagatggggggaaagccgagaaggaagaaccctcaggaaggcctgtacaatgaactgcagaaagataagatggcggaggcctacagtgagattgggatgaaaggcgagcgccggaggggcaaggggcacgatggcctttaccagggtctcagtacagccaccaaggacacctacgacgcccttcacatgcaggccctgccccctcgctaaatcgggctagccgcccctctccctcccccccccctaacgttactggccgaagccgcttggaataaggccggtgtgcgtttgtctatatgttattttccaccatattgccgtcttttggcaatgtgagggcccggaaacctggccctgtcttcttgacgagcattcctaggggtctttcccctctcgccaaaggaatgcaaggtctgttgaatgtcgtgaaggaagcagttcctctggaagcttcttgaagacaaacaacgtctgtagcgaccctttgcaggcagcggaaccccccacctggcgacaggtgcctctgcggccaaaagccacgtgtataagatacacctgcaaaggcggcacaaccccagtgccacgttgtgagttggatagttgtggaaagagtcaaatggctctcctcaagcgtattcaacaaggggctgaaggatgcccagaaggtaccccattgtatgggatctgatctggggcctcggtgcacatgctttacatgtgtttagtcgaggttaaaaaaacgtctaggccccccgaaccacggggacgtggttttcctttgaaaaacacgatgataagcttgccacaacccacaaggagacgaccttccatgtgccaccaacagctcgtgatcagctggttctccctggtgttcctggctagccccctggtggccatctgggagctcaagaaagacgtgtacgtggtggaactggactggtaccccgacgcccctggcgaaatggtggtgctgacatgcgacacccctgaggaggatggcattacctggaccctcgatcagagctccgaggtgctgggcagcggcaaaaccctgaccatccaggtgaaggagtttggcgatgccggccagtacacatgtcacaagggcggcgaggtgctgagccactccctgctgctgctccacaagaaggaagatggcatctggagcaccgacattctgaaggatcagaaggagcccaagaacaagacattcctgaggtgtgaggccaagaactacagcggcaggtttacctgctggtggctgacaacaatcagcaccgacctcacattctccgtcaagtcctccaggggttcttccgaccctcaaggcgtgacatgcggcgctgccaccctgagcgctgagagagtcaggggcgacaacaaggagtacgagtacagcgtcgaatgtcaggaggacagcgcctgtcccgccgctgaagagagcctgcctatcgaggtgatggtggacgccgtgcacaaactgaagtatgagaattacacctccagcttcttcatcagggacatcatcaaacccgatccccccaagaacctgcagctgaagcctctgaagaacagcagacaggtcgaagtgtcctgggagtaccctgatacctggtccacaccccacagctacttcagcctgaccttttgcgtgcaggtgcagggcaagagcaaaagggagaagaaggacagggtgtttaccgacaagacctccgccacagtgatttgcagaaagaacgcctccatcagcgtgagggcccaggacaggtattacagcagctcctggagcgaatgggctagcgtgccctgtagcggaggaggaggcagcggaggaggaggttctggaggaggcggcagcagaaacctgcctgtcgctacccccgaccccggaatgttcccctgcctgcaccactcccagaacctcctgagggccgtgtccaacatgctgcagaaggctagacagaccctcgaattctacccctgtaccagcgaggagatcgaccatgaggacatcaccaaggataagaccagcaccgtggaggcttgcctgcctctggagctgaccaaaaacgagagctgcctgaacagcagggaaaccagcttcattaccaacggctcctgcctggcctccaggaagacatccttcatgatggccctgtgcctcagcagcatctacgaggacctgaagatgtatcaggtggagtttaagaccatgaatgccaagctgctgatggaccctaagaggcagatcttcctggaccagaatatgctggccgtgattgacgagctgatgcaggccctcaactttaacagcgagaccgtgccccagaaaagcagcctcgaagagcctgacttctacaaaaccaagattaagctgtgtatcctgctgcacgccttcaggatcagggccgtgaccatcgacagggtgatgagctacctgaacgccagcggtggatccggaggagttggttcgctaaactgcatcgtcgctgtgtcccagaacatgggcgccggcaagaacggggacctgccctggccaccgctcaggaatgaattcagatatttccagagaatgaccacaacctcttcagtagaaggtaaacagaatctggtgattatgggtaagaagacctggttctccattcctgagaagaatcgacctttaaagggtagaattaatttagttctcagcagagaactcaaggaacctccacaaggagctcattttctttccagaagtctagatgatgccttaaaacttactgaacaaccagaattagcaaataaagtagacatggtctggatagttggtggcagttctgtttataaggaagccatgaatcacccaggccatcttaaactatttgtgacaaggatcatgcaagactttgaaagtgacacgttttttccagaaattgatttggagaaatataaacttctgccagaatacccaggtgttctctctgatgtccaggaggagaaaggcattaagtacaaatttgaagtatatgagaagaatgattaa

SEQ ID NO: 1160 - DNA, 1461 bp, Artificial Sequence; identical to SEQ ID NO: 835
  Description of Artificial Sequence: Synthetic Construct

SEQ ID NO: 1161 - DNA, 2196 bp, Artificial Sequence
  Description of Artificial Sequence: Synthetic Construct
atgtgccaccaacagctcgtgatcagctggttctccctggtgttcctggctagccccctggtggccatctgggagctcaagaaagacgtgtacgtggtggaactggactggtaccccgacgcccctggcgaaatggtggtgctgacatgcgacacccctgaggaggatggcattacctggaccctcgatcagagctccgaggtgctgggcagcggcaaaaccctgaccatccaggtgaaggagtttggcgatgccggccagtacacatgtcacaagggcggcgaggtgctgagccactccctgctgctgctccacaagaaggaagatggcatctggagcaccgacattctgaaggatcagaaggagcccaagaacaagacattcctgaggtgtgaggccaagaactacagcggcaggtttacctgctggtggctgacaacaatcagcaccgacctcacattctccgtcaagtcctccaggggttcttccgaccctcaaggcgtgacatgcggcgctgccaccctgagcgctgagagagtcaggggcgacaacaaggagtacgagtacagcgtcgaatgtcaggaggacagcgcctgtcccgccgctgaagagagcctgcctatcgaggtgatggtggacgccgtgcacaaactgaagtatgagaattacacctccagcttcttcatcagggacatcatcaaacccgatccccccaagaacctgcagctgaagcctctgaagaacagcagacaggtcgaagtgtcctgggagtaccctgatacctggtccacaccccacagctacttcagcctgaccttttgcgtgcaggtgcagggcaagagcaaaagggagaagaaggacagggtgtttaccgacaagacctccgccacagtgatttgcagaaagaacgcctccatcagcgtgagggcccaggacaggtattacagcagctcctggagcgaatgggctagcgtgccctgtagcggaggaggaggcagcggaggaggaggttctggaggaggcggcagcagaaacctgcctgtcgctacccccgaccccggaatgttcccctgcctgcaccactcccagaacctcctgagggccgtgtccaacatgctgcagaaggctagacagaccctcgaattctacccctgtaccagcgaggagatcgaccatgaggacatcaccaaggataagaccagcaccgtggaggcttgcctgcctctggagctgaccaaaaacgagagctgcctgaacagcagggaaaccagcttcattaccaacggctcctgcctggcctccaggaagacatccttcatgatggccctgtgcctcagcagcatctacgaggacctgaagatgtatcaggtggagtttaagaccatgaatgccaagctgctgatggaccctaagaggcagatcttcctggaccagaatatgctggccgtgattgacgagctgatgcaggccctcaactttaacagcgagaccgtgccccagaaaagcagcctcgaagagcctgacttctacaaaaccaagattaagctgtgtatcctgctgcacgccttcaggatcagggccgtgaccatcgacagggtgatgagctacctgaacgccagcggtggatccggaggagttggttcgctaaactgcatcgtcgctgtgtcccagaacatgggcgccggcaagaacggggacctgccctggccaccgctcaggaatgaattcagatatttccagagaatgaccacaacctcttcagtagaaggtaaacagaatctggtgattatgggtaagaagacctggttctccattcctgagaagaatcgacctttaaagggtagaattaatttagttctcagcagagaactcaaggaacctccacaaggagctcattttctttccagaagtctagatgatgccttaaaacttactgaacaaccagaattagcaaataaagtagacatggtctggatagttggtggcagttctgtttataaggaagccatgaatcacccaggccatcttaaactatttgtgacaaggatcatgcaagactttgaaagtgacacgttttttccagaaattgatttggagaaatataaacttctgccagaatacccaggtgttctctctgatgtccaggaggagaaaggcattaagtacaaatttgaagtatatgagaagaatgattaa

SEQ ID NO: 1162 - DNA, 4276 bp, Artificial Sequence
  Description of Artificial Sequence: Synthetic Construct
atggccttaccagtgaccgccttgctcctgccgctggccttgctgctccacgccgccaggccggacatccagatgacacagactacatcctccctgtctgcctctctgggagacagagtcaccatcagttgcagggcaagtcaggacattagtaaatatttaaattggtatcagcagaaaccagatggaactgttaaactcctgatctaccatacatcaagattacactcaggagtcccatcaaggttcagtggcagtgggtctggaacagattattctctcaccattagcaacctggagcaagaagatattgccacttacttttgccaacagggtaatacgcttccgtacacgttcggaggggggaccaagctggagatcacaggtggcggtggctcgggcggtggtgggtcgggtggcggcggatctgaggtgaaactgcaggagtcaggacctggcctggtggcgccctcacagagcctgtccgtcacatgcactgtctcaggggtctcattacccgactatggtgtaagctggattcgccagcctccacgaaagggtctggagtggctgggagtaatatggggtagtgaaaccacatactataattcagctctcaaatccagactgaccatcatcaaggacaactccaagagccaagttttcttaaaaatgaacagtctgcaaactgatgacacagccatttactactgtgccaaacattattactacggtggtagctatgctatggactactggggccaaggaacctcagtcaccgtctcctcaaccacgacgccagcgccgcgaccaccaacaccggcgcccaccatcgcgtcgcagcccctgtccctgcgcccagaggcgtgccggccagcggcggggggcgcagtgcacacgagggggctggacttcgcctgtgatatctacatctgggcgcccttggccgggacttgtggggtccttctcctgtcactggttatcaccctttactgcaaacggggcagaaagaaactcctgtatatattcaaacaaccatttatgagaccagtacaaactactcaagaggaagatggctgtagctgccgatttccagaagaagaagaaggaggatgtgaactgagagtgaagttcagcaggagcgcagacgcccccgcgtacaagcagggccagaaccagctctataacgagctcaatctaggacgaagagaggagtacgatgttttggacaagagacgtggccgggaccctgagatggggggaaagccgagaaggaagaaccctcaggaaggcctgtacaatgaactgcagaaagataagatggcggaggcctacagtgagattgggatgaaaggcgagcgccggaggggcaaggggcacgatggcctttaccagggtctcagtacagccaccaaggacacctacgacgcccttcacatgcaggccctgccccctcgctaaatcgggctagccgcccctctccctcccccccccctaacgttactggccgaagccgcttggaataaggccggtgtgcgtttgtctatatgttattttccaccatattgccgtcttttggcaatgtgagggcccggaaacctggccctgtcttcttgacgagcattcctaggggtctttcccctctcgccaaaggaatgcaaggtctgttgaatgtcgtgaaggaagcagttcctctggaagcttcttgaagacaaacaacgtctgtagcgaccctttgcaggcagcggaaccccccacctggcgacaggtgcctctgcggccaaaagccacgtgtataagatacacctgcaaaggcggcacaaccccagtgccacgttgtgagttggatagttgtggaaagagtcaaatggctctcctcaagcgtattcaacaaggggctgaaggatgcccagaaggtaccccattgtatgggatctgatctggggcctcggtgcacatgctttacatgtgtttagtcgaggttaaaaaaacgtctaggccccccgaaccacggggacgtggttttcctttgaaaaacacgatgataagcttgccacaacccacaaggagacgaccttccatgtgccaccaacagctcgtgatcagctggttctccctggtgttcctggctagccccctggtggccatctgggagctcaagaaagacgtgtacgtggtggaactggactggtaccccgacgcccctggcgaaatggtggtgctgacatgcgacacccctgaggaggatggcattacctggaccctcgatcagagctccgaggtgctgggcagcggcaaaaccctgaccatccaggtgaaggagtttggcgatgccggccagtacacatgtcacaagggcggcgaggtgctgagccactccctgctgctgctccacaagaaggaagatggcatctggagcaccgacattctgaaggatcagaaggagcccaagaacaagacattcctgaggtgtgaggccaagaactacagcggcaggtttacctgctggtggctgacaacaatcagcaccgacctcacattctccgtcaagtcctccaggggttcttccgaccctcaaggcgtgacatgcggcgctgccaccctgagcgctgagagagtcaggggcgacaacaaggagtacgagtacagcgtcgaatgtcaggaggacagcgcctgtcccgccgctgaagagagcctgcctatcgaggtgatggtggacgccgtgcacaaactgaagtatgagaattacacctccagcttcttcatcagggacatcatcaaacccgatccccccaagaacctgcagctgaagcctctgaagaacagcagacaggtcgaagtgtcctgggagtaccctgatacctggtccacaccccacagctacttcagcctgaccttttgcgtgcaggtgcagggcaagagcaaaagggagaagaaggacagggtgtttaccgacaagacctccgccacagtgatttgcagaaagaacgcctccatcagcgtgagggcccaggacaggtattacagcagctcctggagcgaatgggctagcgtgccctgtagcggaggaggaggcagcggaggaggaggttctggaggaggcggcagcagaaacctgcctgtcgctacccccgaccccggaatgttcccctgcctgcaccactcccagaacctcctgagggccgtgtccaacatgctgcagaaggctagacagaccctcgaattctacccctgtaccagcgaggagatcgaccatgaggacatcaccaaggataagaccagcaccgtggaggcttgcctgcctctggagctgaccaaaaacgagagctgcctgaacagcagggaaaccagcttcattaccaacggctcctgcctggcctccaggaagacatccttcatgatggccctgtgcctcagcagcatctacgaggacctgaagatgtatcaggtggagtttaagaccatgaatgccaagctgctgatggaccctaagaggcagatcttcctggaccagaatatgctggccgtgattgacgagctgatgcaggccctcaactttaacagcgagaccgtgccccagaaaagcagcctcgaagagcctgacttctacaaaaccaagattaagctgtgtatcctgctgcacgccttcaggatcagggccgtgaccatcgacagggtgatgagctacctgaacgccagcggtggatccggaggagttggttcgctaaactgcatcgtcgctgtgtcccagaacatgggcgtcggcaagaacggggacctgccctggccaccgctcaggaatgaattcagatatttccagagaatgaccacaacctcttcagtagaaggtaaacagaatctggtgattatgggtaagaagacctggttctccattcctgagaagaatcgacctttaaagggtagaattaatttagttctcagcagagaactcaaggaacctccacaaggagctcattttctttccagaagtctagatgatgccttaaaacttactgaacaaccagaattagcaaataaagtagacatggtctggatagttggtggcagttctgttattaaggaagccatgaatcacccaggccatcttaaactatttgtgacaaggatcatgcaagactttgaaagtgacacgttttttccagaaattgatttggagaaatataaacttctgccagaatacccaggtgttctctctgatgtccaggaggagaaaggcattaagtacaaatttgaagtatatgagaagaatgattaa

SEQ ID NO: 1163 - DNA, 1461 bp, Artificial Sequence; identical to SEQ ID NO: 835
  Description of Artificial Sequence: Synthetic Construct

SEQ ID NO: 1164 - DNA, 2196 bp, Artificial Sequence
  Description of Artificial Sequence: Synthetic Construct
atgtgccaccaacagctcgtgatcagctggttctccctggtgttcctggctagccccctggtggccatctgggagctcaagaaagacgtgtacgtggtggaactggactggtaccccgacgcccctggcgaaatggtggtgctgacatgcgacacccctgaggaggatggcattacctggaccctcgatcagagctccgaggtgctgggcagcggcaaaaccctgaccatccaggtgaaggagtttggcgatgccggccagtacacatgtcacaagggcggcgaggtgctgagccactccctgctgctgctccacaagaaggaagatggcatctggagcaccgacattctgaaggatcagaaggagcccaagaacaagacattcctgaggtgtgaggccaagaactacagcggcaggtttacctgctggtggctgacaacaatcagcaccgacctcacattctccgtcaagtcctccaggggttcttccgaccctcaaggcgtgacatgcggcgctgccaccctgagcgctgagagagtcaggggcgacaacaaggagtacgagtacagcgtcgaatgtcaggaggacagcgcctgtcccgccgctgaagagagcctgcctatcgaggtgatggtggacgccgtgcacaaactgaagtatgagaattacacctccagcttcttcatcagggacatcatcaaacccgatccccccaagaacctgcagctgaagcctctgaagaacagcagacaggtcgaagtgtcctgggagtaccctgatacctggtccacaccccacagctacttcagcctgaccttttgcgtgcaggtgcagggcaagagcaaaagggagaagaaggacagggtgtttaccgacaagacctccgccacagtgatttgcagaaagaacgcctccatcagcgtgagggcccaggacaggtattacagcagctcctggagcgaatgggctagcgtgccctgtagcggaggaggaggcagcggaggaggaggttctggaggaggcggcagcagaaacctgcctgtcgctacccccgaccccggaatgttcccctgcctgcaccactcccagaacctcctgagggccgtgtccaacatgctgcagaaggctagacagaccctcgaattctacccctgtaccagcgaggagatcgaccatgaggacatcaccaaggataagaccagcaccgtggaggcttgcctgcctctggagctgaccaaaaacgagagctgcctgaacagcagggaaaccagcttcattaccaacggctcctgcctggcctccaggaagacatccttcatgatggccctgtgcctcagcagcatctacgaggacctgaagatgtatcaggtggagtttaagaccatgaatgccaagctgctgatggaccctaagaggcagatcttcctggaccagaatatgctggccgtgattgacgagctgatgcaggccctcaactttaacagcgagaccgtgccccagaaaagcagcctcgaagagcctgacttctacaaaaccaagattaagctgtgtatcctgctgcacgccttcaggatcagggccgtgaccatcgacagggtgatgagctacctgaacgccagcggtggatccggaggagttggttcgctaaactgcatcgtcgctgtgtcccagaacatgggcgtcggcaagaacggggacctgccctggccaccgctcaggaatgaattcagatatttccagagaatgaccacaacctcttcagtagaaggtaaacagaatctggtgattatgggtaagaagacctggttctccattcctgagaagaatcgacctttaaagggtagaattaatttagttctcagcagagaactcaaggaacctccacaaggagctcattttctttccagaagtctagatgatgccttaaaacttactgaacaaccagaattagcaaataaagtagacatggtctggatagttggtggcagttctgttattaaggaagccatgaatcacccaggccatcttaaactatttgtgacaaggatcatgcaagactttgaaagtgacacgttttttccagaaattgatttggagaaatataaacttctgccagaatacccaggtgttctctctgatgtccaggaggagaaaggcattaagtacaaatttgaagtatatgagaagaatgattaa

SEQ ID NO: 1165 - DNA, 4276 bp, Artificial Sequence
  Description of Artificial Sequence: Synthetic Construct
atggccttaccagtgaccgccttgctcctgccgctggccttgctgctccacgccgccaggccggacatccagatgacacagactacatcctccctgtctgcctctctgggagacagagtcaccatcagttgcagggcaagtcaggacattagtaaatatttaaattggtatcagcagaaaccagatggaactgttaaactcctgatctaccatacatcaagattacactcaggagtcccatcaaggttcagtggcagtgggtctggaacagattattctctcaccattagcaacctggagcaagaagatattgccacttacttttgccaacagggtaatacgcttccgtacacgttcggaggggggaccaagctggagatcacaggtggcggtggctcgggcggtggtgggtcgggtggcggcggatctgaggtgaaactgcaggagtcaggacctggcctggtggcgccctcacagagcctgtccgtcacatgcactgtctcaggggtctcattacccgactatggtgtaagctggattcgccagcctccacgaaagggtctggagtggctgggagtaatatggggtagtgaaaccacatactataattcagctctcaaatccagactgaccatcatcaaggacaactccaagagccaagttttcttaaaaatgaacagtctgcaaactgatgacacagccatttactactgtgccaaacattattactacggtggtagctatgctatggactactggggccaaggaacctcagtcaccgtctcctcaaccacgacgccagcgccgcgaccaccaacaccggcgcccaccatcgcgtcgcagcccctgtccctgcgcccagaggcgtgccggccagcggcggggggcgcagtgcacacgagggggctggacttcgcctgtgatatctacatctgggcgcccttggccgggacttgtggggtccttctcctgtcactggttatcaccctttactgcaaacggggcagaaagaaactcctgtatatattcaaacaaccatttatgagaccagtacaaactactcaagaggaagatggctgtagctgccgatttccagaagaagaagaaggaggatgtgaactgagagtgaagttcagcaggagcgcagacgcccccgcgtacaagcagggccagaaccagctctataacgagctcaatctaggacgaagagaggagtacgatgttttggacaagagacgtggccgggaccctgagatggggggaaagccgagaaggaagaaccctcaggaaggcctgtacaatgaactgcagaaagataagatggcggaggcctacagtgagattgggatgaaaggcgagcgccggaggggcaaggggcacgatggcctttaccagggtctcagtacagccaccaaggacacctacgacgcccttcacatgcaggccctgccccctcgctaaatcgggctagccgcccctctccctcccccccccctaacgttactggccgaagccgcttggaataaggccggtgtgcgtttgtctatatgttattttccaccatattgccgtcttttggcaatgtgagggcccggaaacctggccctgtcttcttgacgagcattcctaggggtctttcccctctcgccaaaggaatgcaaggtctgttgaatgtcgtgaaggaagcagttcctctggaagcttcttgaagacaaacaacgtctgtagcgaccctttgcaggcagcggaaccccccacctggcgacaggtgcctctgcggccaaaagccacgtgtataagatacacctgcaaaggcggcacaaccccagtgccacgttgtgagttggatagttgtggaaagagtcaaatggctctcctcaagcgtattcaacaaggggctgaaggatgcccagaaggtaccccattgtatgggatctgatctggggcctcggtgcacatgctttacatgtgtttagtcgaggttaaaaaaacgtctaggccccccgaaccacggggacgtggttttcctttgaaaaacacgatgataagcttgccacaacccacaaggagacgaccttccatgtgccaccaacagctcgtgatcagctggttctccctggtgttcctggctagccccctggtggccatctgggagctcaagaaagacgtgtacgtggtggaactggactggtaccccgacgcccctggcgaaatggtggtgctgacatgcgacacccctgaggaggatggcattacctggaccctcgatcagagctccgaggtgctgggcagcggcaaaaccctgaccatccaggtgaaggagtttggcgatgccggccagtacacatgtcacaagggcggcgaggtgctgagccactccctgctgctgctccacaagaaggaagatggcatctggagcaccgacattctgaaggatcagaaggagcccaagaacaagacattcctgaggtgtgaggccaagaactacagcggcaggtttacctgctggtggctgacaacaatcagcaccgacctcacattctccgtcaagtcctccaggggttcttccgaccctcaaggcgtgacatgcggcgctgccaccctgagcgctgagagagtcaggggcgacaacaaggagtacgagtacagcgtcgaatgtcaggaggacagcgcctgtcccgccgctgaagagagcctgcctatcgaggtgatggtggacgccgtgcacaaactgaagtatgagaattacacctccagcttcttcatcagggacatcatcaaacccgatccccccaagaacctgcagctgaagcctctgaagaacagcagacaggtcgaagtgtcctgggagtaccctgatacctggtccacaccccacagctacttcagcctgaccttttgcgtgcaggtgcagggcaagagcaaaagggagaagaaggacagggtgtttaccgacaagacctccgccacagtgatttgcagaaagaacgcctccatcagcgtgagggcccaggacaggtattacagcagctcctggagcgaatgggctagcgtgccctgtagcggaggaggaggcagcggaggaggaggttctggaggaggcggcagcagaaacctgcctgtcgctacccccgaccccggaatgttcccctgcctgcaccactcccagaacctcctgagggccgtgtccaacatgctgcagaaggctagacagaccctcgaattctacccctgtaccagcgaggagatcgaccatgaggacatcaccaaggataagaccagcaccgtggaggcttgcctgcctctggagctgaccaaaaacgagagctgcctgaacagcagggaaaccagcttcattaccaacggctcctgcctggcctccaggaagacatccttcatgatggccctgtgcctcagcagcatctacgaggacctgaagatgtatcaggtggagtttaagaccatgaatgccaagctgctgatggaccctaagaggcagatcttcctggaccagaatatgctggccgtgattgacgagctgatgcaggccctcaactttaacagcgagaccgtgccccagaaaagcagcctcgaagagcctgacttctacaaaaccaagattaagctgtgtatcctgctgcacgccttcaggatcagggccgtgaccatcgacagggtgatgagctacctgaacgccagcggtggatccggaggagttggttcgctaaactgcatcgtcgctgtgtcccagaacatgggcgccggcaagaacggggacctgccctggccaccgctcaggaatgaattcagatatttccagagaatgaccacaacctcttcagtagaaggtaaacagaatctggtgattatgggtaagaagacctggttctccattcctgagaagaatcgacctttaaagggtagaattaatttagttctcagcagagaactcaaggaacctccacaaggagctcattttctttccagaagtctagatgatgccttaaaacttactgaacaaccagaattagcaaataaagtagacatggtctggatagttggtggcagttctgttattaaggaagccatgaatcacccaggccatcttaaactatttgtgacaaggatcatgcaagactttgaaagtgacacgttttttccagaaattgatttggagaaatataaacttctgccagaatacccaggtgttctctctgatgtccaggaggagaaaggcattaagtacaaatttgaagtatatgagaagaatgattaa

SEQ ID NO: 1166 - DNA, 1461 bp, Artificial Sequence; identical to SEQ ID NO: 835
  Description of Artificial Sequence: Synthetic Construct

SEQ ID NO: 1167 - DNA, 2196 bp, Artificial Sequence
  Description of Artificial Sequence: Synthetic Construct
atgtgccaccaacagctcgtgatcagctggttctccctggtgttcctggctagccccctggtggccatctgggagctcaagaaagacgtgtacgtggtggaactggactggtaccccgacgcccctggcgaaatggtggtgctgacatgcgacacccctgaggaggatggcattacctggaccctcgatcagagctccgaggtgctgggcagcggcaaaaccctgaccatccaggtgaaggagtttggcgatgccggccagtacacatgtcacaagggcggcgaggtgctgagccactccctgctgctgctccacaagaaggaagatggcatctggagcaccgacattctgaaggatcagaaggagcccaagaacaagacattcctgaggtgtgaggccaagaactacagcggcaggtttacctgctggtggctgacaacaatcagcaccgacctcacattctccgtcaagtcctccaggggttcttccgaccctcaaggcgtgacatgcggcgctgccaccctgagcgctgagagagtcaggggcgacaacaaggagtacgagtacagcgtcgaatgtcaggaggacagcgcctgtcccgccgctgaagagagcctgcctatcgaggtgatggtggacgccgtgcacaaactgaagtatgagaattacacctccagcttcttcatcagggacatcatcaaacccgatccccccaagaacctgcagctgaagcctctgaagaacagcagacaggtcgaagtgtcctgggagtaccctgatacctggtccacaccccacagctacttcagcctgaccttttgcgtgcaggtgcagggcaagagcaaaagggagaagaaggacagggtgtttaccgacaagacctccgccacagtgatttgcagaaagaacgcctccatcagcgtgagggcccaggacaggtattacagcagctcctggagcgaatgggctagcgtgccctgtagcggaggaggaggcagcggaggaggaggttctggaggaggcggcagcagaaacctgcctgtcgctacccccgaccccggaatgttcccctgcctgcaccactcccagaacctcctgagggccgtgtccaacatgctgcagaaggctagacagaccctcgaattctacccctgtaccagcgaggagatcgaccatgaggacatcaccaaggataagaccagcaccgtggaggcttgcctgcctctggagctgaccaaaaacgagagctgcctgaacagcagggaaaccagcttcattaccaacggctcctgcctggcctccaggaagacatccttcatgatggccctgtgcctcagcagcatctacgaggacctgaagatgtatcaggtggagtttaagaccatgaatgccaagctgctgatggaccctaagaggcagatcttcctggaccagaatatgctggccgtgattgacgagctgatgcaggccctcaactttaacagcgagaccgtgccccagaaaagcagcctcgaagagcctgacttctacaaaaccaagattaagctgtgtatcctgctgcacgccttcaggatcagggccgtgaccatcgacagggtgatgagctacctgaacgccagcggtggatccggaggagttggttcgctaaactgcatcgtcgctgtgtcccagaacatgggcgccggcaagaacggggacctgccctggccaccgctcaggaatgaattcagatatttccagagaatgaccacaacctcttcagtagaaggtaaacagaatctggtgattatgggtaagaagacctggttctccattcctgagaagaatcgacctttaaagggtagaattaatttagttctcagcagagaactcaaggaacctccacaaggagctcattttctttccagaagtctagatgatgccttaaaacttactgaacaaccagaattagcaaataaagtagacatggtctggatagttggtggcagttctgttattaaggaagccatgaatcacccaggccatcttaaactatttgtgacaaggatcatgcaagactttgaaagtgacacgttttttccagaaattgatttggagaaatataaacttctgccagaatacccaggtgttctctctgatgtccaggaggagaaaggcattaagtacaaatttgaagtatatgagaagaatgattaa

SEQ ID NO: 1168 - DNA, 2712 bp, Artificial Sequence
  Description of Artificial Sequence: Synthetic Construct
atggccttaccagtgaccgccttgctcctgccgctggccttgctgctccacgccgccaggccggacatccagatgacacagactacatcctccctgtctgcctctctgggagacagagtcaccatcagttgcagggcaagtcaggacattagtaaatatttaaattggtatcagcagaaaccagatggaactgttaaactcctgatctaccatacatcaagattacactcaggagtcccatcaaggttcagtggcagtgggtctggaacagattattctctcaccattagcaacctggagcaagaagatattgccacttacttttgccaacagggtaatacgcttccgtacacgttcggaggggggaccaagctggagatcacaggtggcggtggctcgggcggtggtgggtcgggtggcggcggatctgaggtgaaactgcaggagtcaggacctggcctggtggcgccctcacagagcctgtccgtcacatgcactgtctcaggggtctcattacccgactatggtgtaagctggattcgccagcctccacgaaagggtctggagtggctgggagtaatatggggtagtgaaaccacatactataattcagctctcaaatccagactgaccatcatcaaggacaactccaagagccaagttttcttaaaaatgaacagtctgcaaactgatgacacagccatttactactgtgccaaacattattactacggtggtagctatgctatggactactggggccaaggaacctcagtcaccgtctcctcaaccacgacgccagcgccgcgaccaccaacaccggcgcccaccatcgcgtcgcagcccctgtccctgcgcccagaggcgtgccggccagcggcggggggcgcagtgcacacgagggggctggacttcgcctgtgatatctacatctgggcgcccttggccgggacttgtggggtccttctcctgtcactggttatcaccctttactgcaaacggggcagaaagaaactcctgtatatattcaaacaaccatttatgagaccagtacaaactactcaagaggaagatggctgtagctgccgatttccagaagaagaagaaggaggatgtgaactgagagtgaagttcagcaggagcgcagacgcccccgcgtacaagcagggccagaaccagctctataacgagctcaatctaggacgaagagaggagtacgatgttttggacaagagacgtggccgggaccctgagatggggggaaagccgagaaggaagaaccctcaggaaggcctgtacaatgaactgcagaaagataagatggcggaggcctacagtgagattgggatgaaaggcgagcgccggaggggcaaggggcacgatggcctttaccagggtctcagtacagccaccaaggacacctacgacgcccttcacatgcaggccctgccccctcgcggatccggagctactaacttcagcctgctgaagcaggctggagacgtggaggagaaccctggacctatggactggacctggattctgtttctggtggccgctgccacaagagtgcacagcaattgggtcaacgtgatcagcgacctgaagaagatcgaggacctgatccagagcatgcacatcgacgccacactgtacaccgagtccgatgtgcaccctagctgcaaagtgaccgccatgaagtgctttctgctggaactgcaagtgatcagcctggaaagcggcgacgccagcatccacgataccgtggaaaatctgatcatcctggccaacaacagcctgagcagcaacggcaatgtgaccgagagcggctgcaaagagtgcgaggaactggaagagaagaacatcaaagagttcctccagagcttcgtccacatcgtgcagatgttcatcaacaccagctctggcggaggaagcggaggcggaggatctggtggtggtggatctggcggcggtggtagtggcggaggttctctgcaaatcacctgtcctccacctatgagcgtggaacacgccgacatctgggtcaagagctacagcctgtacagcagagagcggtacatctgcaacagcggcttcaagagaaaggccggcacaagcagcctgaccgagtgtgtgctgaacaaggccacaaacgtggcccactggaccacacctagcctgaagtgcatcagagatcccgctctggttcaccagaggcctgctcctccatctacagtgacaacagctggcgtgacccctcagcctgagtctctgtctccatctggaaaagagcctgccgccagctctcccagctctaacaatactgctgccaccacagccgccatcgtgcctggatctcagctgatgcctagcaagagccctagcaccggcacaacagagatcagctctcacgagtctagccacggcaccccatctcagaccacagccaagaattgggagctgaccgcctctgcctctcatcagccacctggtgtttaccctcaaggccactctgataccaccgtggccatcagcacaagcacagtgctgctgtgtggactgtctgccgtgtctctgctggcctgctacctgaagtctagacagacacctcctctggccagcgtggaaatggaagccatggaagctctgcctgtgacatggggcaccagcagcagagatgaggacctcgagaattgcagccaccacctgtag

SEQ ID NO: 1169 - protein, 119 aa, Artificial Sequence; identical to SEQ ID NO: 174
  Description of Artificial Sequence: Synthetic polypeptide

SEQ ID NO: 1170 - protein, 111 aa, Artificial Sequence
  Description of Artificial Sequence: Synthetic polypeptide
ELVLTQSPKFMSTSVGDRVSVTCKASQNVGTNVAWYQQKPGQSPKPLIYSATYRNSGVPDRFTGSGSGTDFTLTITNVQSKDLADYFYFCQYNRYPYTSGGGTKLEIKRRS

SEQ ID NO: 1171 - protein, 42 aa, Artificial Sequence; identical to SEQ ID NO: 233
  Description of Artificial Sequence: Synthetic polypeptide

SEQ ID NO: 1172 - protein, 48 aa, Artificial Sequence
  Description of Artificial Sequence: Synthetic polypeptide
QRRKYRSNKGESPVEPAEPCRYSCPREEEGSTIPIQEDYRKPEPACSP

SEQ ID NO: 1173 - protein, 112 aa, Artificial Sequence; identical to SEQ ID NO: 299
  Description of Artificial Sequence: Synthetic polypeptide

SEQ ID NO: 1174 - protein, 112 aa, Artificial Sequence; identical to SEQ ID NO: 283
  Description of Artificial Sequence: Synthetic polypeptide

SEQ ID NO: 1175 - protein, 35 aa, Artificial Sequence; identical to SEQ ID NO: 242
  Description of Artificial Sequence: Synthetic polypeptide

SEQ ID NO: 1176 - protein, 41 aa, Artificial Sequence; identical to SEQ ID NO: 257
  Description of Artificial Sequence: Synthetic polypeptide

SEQ ID NO: 1177 - DNA, 126 bp, Artificial Sequence; identical to SEQ ID NO: 785
  Description of Artificial Sequence: Synthetic polynucleotide

SEQ ID NO: 1178 - DNA, 126 bp, Artificial Sequence
  Description of Artificial Sequence: Synthetic polynucleotide
aagcgcggtcggaagaagctgctgtacatctttaagcaacccttcatgaggcctgtgcagactactcaagaggaggacggctgttcatgccggttcccagaggaggaggaaggcggctgcgaactg

SEQ ID NO: 1179 - DNA, 123 bp, Artificial Sequence
  Description of Artificial Sequence: Synthetic polynucleotide
aggagtaagaggagcaggctcctgcacagtgactacatgaacatgactccccgccgccccgggcccacccgcaagcattaccagccctatgccccaccacgcgacttcgcagcctatcgctcc

SEQ ID NO: 1180 - DNA, 336 bp, Artificial Sequence; identical to SEQ ID NO: 786
  Description of Artificial Sequence: Synthetic polynucleotide

SEQ ID NO: 1181 - DNA, 336 bp, Artificial Sequence
  Description of Artificial Sequence: Synthetic polynucleotide
cgcgtgaaattcagccgcagcgcagatgctccagcctacaagcaggggcagaaccagctctacaacgaactcaatcttggtcggagagaggagtacgacgtgctggacaagcggagaggacgggacccagaaatgggcgggaagccgcgcagaaagaatccccaagagggcctgtacaacgagctccaaaaggataagatggcagaagcctatagcgagattggtatgaaaggggaacgcagaagaggcaaaggccacgacggactgtaccagggactcagcaccgccaccaaggacacctatgacgctcttcacatgcaggccctgccgcctcgg

SEQ ID NO: 1182 - DNA, 336 bp, Artificial Sequence
  Description of Artificial Sequence: Synthetic polynucleotide
agagtgaagttcagcaggagcgcagacgcccccgcgtaccagcagggccagaaccagctctataacgagctcaatctaggacgaagagaggagtacgatgttttggacaagagacgtggccgggaccctgagatggggggaaagccgagaaggaagaaccctcaggaaggcctgtacaatgaactgcagaaagataagatggcggaggcctacagtgagattgggatgaaaggcgagcgccggaggggcaaggggcacgatggcctttaccagggtctcagtacagccaccaaggacacctacgacgcccttcacatgcaggccctgccccctcgc

SEQ ID NO: 1183 - DNA, 105 bp, Artificial Sequence
  Description of Artificial Sequence: Synthetic polynucleotide
acaaaaaagaagtattcatccagtgtgcacgaccctaacggtgaatacatgttcatgagagcagtgaacacagccaaaaaatccagactcacagatgtgacccta

SEQ ID NO: 1184 - DNA, 123 bp, Artificial Sequence; identical to SEQ ID NO: 1179
  Description of Artificial Sequence: Synthetic polynucleotide

SEQ ID NO: 1185 - protein, 24 aa, Artificial Sequence
  Description of Artificial Sequence: Synthetic peptide
IYIWAPLAGTCGVLLLSLVITLYC

SEQ ID NO: 1186 - DNA, 72 bp, Artificial Sequence
  Description of Artificial Sequence: Synthetic oligonucleotide
atctacatctgggcgcccttggccgggacttgtggggtccttctcctgtcactggttatcaccctttactgc

SEQ ID NO: 1187 - DNA, 72 bp, Artificial Sequence
  Description of Artificial Sequence: Synthetic oligonucleotide
atctacatttgggcccctctggctggtacttgcggggtcctgctgctttcactcgtgatcactctttactgt

SEQ ID NO: 1188 - protein, 69 aa, Artificial Sequence
  Description of Artificial Sequence: Synthetic polypeptide
TTTPAPRPPTPAPTIASQPLSLRPEACRPAAGGAVHTRGLDFACDFWLPIGCAAFVVVCILGCILICWL

SEQ ID NO: 1189 - DNA, 207 bp, Artificial Sequence
  Description of Artificial Sequence: Synthetic polynucleotide
accacgacgccagcgccgcgaccaccaacaccggcgcccaccatcgcgtcgcagcccctgtccctgcgcccagaggcgtgccggccagcggcggggggcgcagtgcacacgagggggctggacttcgcctgtgatttctggttacccataggatgtgcagcctttgttgtagtctgcattttgggatgcatacttatttgttggctt

SEQ ID NO: 1190 - protein, 45 aa, Artificial Sequence; identical to SEQ ID NO: 397
  Description of Artificial Sequence: Synthetic polypeptide

SEQ ID NO: 1191 - DNA, 135 bp, Artificial Sequence
  Description of Artificial Sequence: Synthetic polynucleotide
accacgacgccagcgccgcgaccaccaacaccggcgcccaccatcgcgtcgcagcccctgtccctgcgcccagaggcgtgccggccagcggcggggggcgcagtgcacacgagggggctggacttcgcctgtgat

SEQ ID NO: 1192 - protein, 230 aa, Artificial Sequence; identical to SEQ ID NO: 443
  Description of Artificial Sequence: Synthetic polypeptide

SEQ ID NO: 1193 - DNA, 690 bp, Artificial Sequence
  Description of Artificial Sequence: Synthetic polynucleotide
gagagcaagtacggccctccctgccccccttgccctgcccccgagttcctgggcggacccagcgtgttcctgttcccccccaagcccaaggacaccctgatgatcagccggacccccgaggtgacctgtgtggtggtggacgtgtcccaggaggaccccgaggtccagttcaactggtacgtggacggcgtggaggtgcacaacgccaagaccaagccccgggaggagcagttcaatagcacctaccgggtggtgtccgtgctgaccgtgctgcaccaggactggctgaacggcaaggaatacaagtgtaaggtgtccaacaagggcctgcccagcagcatcgagaaaaccatcagcaaggccaagggccagcctcgggagccccaggtgtacaccctgccccctagccaagaggagatgaccaagaaccaggtgtccctgacctgcctggtgaagggcttctaccccagcgacatcgccgtggagtgggagagcaacggccagcccgagaacaactacaagaccaccccccctgtgctggacagcgacggcagcttcttcctgtacagccggctgaccgtggacaagagccggtggcaggagggcaacgtctttagctgctccgtgatgcacgaggccctgcacaaccactacacccagaagagcctgagcctgtccctgggcaagatg

SEQ ID NO: 1194 - protein, 282 aa, Artificial Sequence; identical to SEQ ID NO: 410
  Description of Artificial Sequence: Synthetic polypeptide

SEQ ID NO: 1195 - DNA, 847 bp, Artificial Sequence
  Description of Artificial Sequence: Synthetic polynucleotide
aggtggcccgaaagtcccaaggcccaggcatctagtgttcctactgcacagccccaggcagaaggcagcctagccaaagctactactgcacctgccactacgcgcaatactggccgtggcggggaggagaagaaaaaggagaaagagaaagaagaacaggaagagagggagaccaagacccctgaatgtccatcccatacccagccgctgggcgtctatctcttgactcccgcagtacaggacttgtggcttagagataaggccacctttacatgtttcgtcgtgggctctgacctgaaggatgcccatttgacttgggaggttgccggaaaggtacccacagggggggttgaggaagggttgctggagcgccattccaatggctctcagagccagcactcaagactcacccttccgagatccctgtggaacgccgggacctctgtcacatgtactctaaatcatcctagcctgcccccacagcgtctgatggcccttagagagccagccgcccaggcaccagttaagcttagcctgaatctgctcgccagtagtgatcccccagaggccgccagctggctcttatgcgaagtgtccggctttagcccgcccaacatcttgctcatgtggctggaggaccagcgagaagtgaacaccagcggcttcgctccagcccggcccccaccccagccgggttctaccacattctgggcctggagtgtcttaagggtcccagcaccacctagcccccagccagccacatacacctgtgttgtgtcccatgaagatagcaggaccctgctaaatgcttctaggagtctggaggtttcctacgtgactgaccatt

SEQ ID NO: 1196 - DNA, 3477 bp, Artificial Sequence
  Description of Artificial Sequence: Synthetic Construct
atggccttaccagtgaccgccttgctcctgccgctggccttgctgctccacgccgccaggccggacatccagatgacacagactacatcctccctgtctgcctctctgggagacagagtcaccatcagttgcagggcaagtcaggacattagtaaatatttaaattggtatcagcagaaaccagatggaactgttaaactcctgatctaccatacatcaagattacactcaggagtcccatcaaggttcagtggcagtgggtctggaacagattattctctcaccattagcaacctggagcaagaagatattgccacttacttttgccaacagggtaatacgcttccgtacacgttcggaggggggaccaagctggagatcacaggtggcggtggctcgggcggtggtgggtcgggtggcggcggatctgaggtgaaactgcaggagtcaggacctggcctggtggcgccctcacagagcctgtccgtcacatgcactgtctcaggggtctcattacccgactatggtgtaagctggattcgccagcctccacgaaagggtctggagtggctgggagtaatatggggtagtgaaaccacatactataattcagctctcaaatccagactgaccatcatcaaggacaactccaagagccaagttttcttaaaaatgaacagtctgcaaactgatgacacagccatttactactgtgccaaacattattactacggtggtagctatgctatggactactggggccaaggaacctcagtcaccgtctcctcaaccacgacgccagcgccgcgaccaccaacaccggcgcccaccatcgcgtcgcagcccctgtccctgcgcccagaggcgtgccggccagcggcggggggcgcagtgcacacgagggggctggacttcgcctgtgatatctacatctgggcgcccttggccgggacttgtggggtccttctcctgtcactggttatcaccctttactgcaaacggggcagaaagaaactcctgtatatattcaaacaaccatttatgagaccagtacaaactactcaagaggaagatggctgtagctgccgatttccagaagaagaagaaggaggatgtgaactgagagtgaagttcagcaggagcgcagacgcccccgcgtacaagcagggccagaaccagctctataacgagctcaatctaggacgaagagaggagtacgatgttttggacaagagacgtggccgggaccctgagatggggggaaagccgagaaggaagaaccctcaggaaggcctgtacaatgaactgcagaaagataagatggcggaggcctacagtgagattgggatgaaaggcgagcgccggaggggcaaggggcacgatggcctttaccagggtctcagtacagccaccaaggacacctacgacgcccttcacatgcaggccctgccccctcgcggatcagctactaacttcagcctgctgaagcaggctggagacgtggaggagaaccctggacctatgtgccaccaacagctcgtgatcagctggttctccctggtgttcctggctagccccctggtggccatctgggagctcaagaaagacgtgtacgtggtggaactggactggtaccccgacgcccctggcgaaatggtggtgctgacatgcgacacccctgaggaggatggcattacctggaccctcgatcagagctccgaggtgctgggcagcggcaaaaccctgaccatccaggtgaaggagtttggcgatgccggccagtacacatgtcacaagggcggcgaggtgctgagccactccctgctgctgctccacaagaaggaagatggcatctggagcaccgacattctgaaggatcagaaggagcccaagaacaagacattcctgaggtgtgaggccaagaactacagcggcaggtttacctgctggtggctgacaacaatcagcaccgacctcacattctccgtcaagtcctccaggggttcttccgaccctcaaggcgtgacatgcggcgctgccaccctgagcgctgagagagtcaggggcgacaacaaggagtacgagtacagcgtcgaatgtcaggaggacagcgcctgtcccgccgctgaagagagcctgcctatcgaggtgatggtggacgccgtgcacaaactgaagtatgagaattacacctccagcttcttcatcagggacatcatcaaacccgatccccccaagaacctgcagctgaagcctctgaagaacagcagacaggtcgaagtgtcctgggagtaccctgatacctggtccacaccccacagctacttcagcctgaccttttgcgtgcaggtgcagggcaagagcaaaagggagaagaaggacagggtgtttaccgacaagacctccgccacagtgatttgcagaaagaacgcctccatcagcgtgagggcccaggacaggtattacagcagctcctggagcgaatgggctagcgtgccctgtagcggaggaggaggcagcggaggaggaggttctggaggaggcggcagcagaaacctgcctgtcgctacccccgaccccggaatgttcccctgcctgcaccactcccagaacctcctgagggccgtgtccaacatgctgcagaaggctagacagaccctcgaattctacccctgtaccagcgaggagatcgaccatgaggacatcaccaaggataagaccagcaccgtggaggcttgcctgcctctggagctgaccaaaaacgagagctgcctgaacagcagggaaaccagcttcattaccaacggctcctgcctggcctccaggaagacatccttcatgatggccctgtgcctcagcagcatctacgaggacctgaagatgtatcaggtggagtttaagaccatgaatgccaagctgctgatggaccctaagaggcagatcttcctggaccagaatatgctggccgtgattgacgagctgatgcaggccctcaactttaacagcgagaccgtgccccagaaaagcagcctcgaagagcctgacttctacaaaaccaagattaagctgtgtatcctgctgcacgccttcaggatcagggccgtgaccatcgacagggtgatgagctacctgaacgccagcggtggatccggaggagtgcaggtggagacaatcagccccggcgatggcaggacctttcctaagcgcggccagacatgcgtggtgcactacaccggcatgctgggcgacggcaagaaggtggacagctcccgggatagaaataagcccttcaagtttatgctgggcaagcaggaagtgatcagaggctgggaggagggagtggcacagatgtctgtgggacagggcgccaagctgacaatcagcccagattacgcatatggagcaaccggacacccaggaatcatcccaccccacgccaccctggtgttcgacgtggagctgctggagctggagtaa

SEQ ID NO: 1197 - DNA, 1999 bp, Artificial Sequence
  Description of Artificial Sequence: Synthetic Construct
atgtgccaccaacagctcgtgatcagctggttctccctggtgttcctggctagccccctggtggccatctgggagctcaagaaagacgtgtacgtggtggaactggactggtaccccgacgcccctggcgaaatggtggtgctgacatgcgacacccctgaggaggatggcattacctggaccctcgatcagagctccgaggtgctgggcagcggcaaaaccctgaccatccaggtgaaggagtttggcgatgccggccagtacacatgtcacaagggcggcgaggtgctgagccactccctgctgctgctccacaagaaggaagatggcatctggagcaccgacattctgaaggatcagaaggagcccaagaacaagacattcctgaggtgtgaggccaagaactacagcggcaggtttacctgctggtggctgacaacaatcagcaccgacctcacattctccgtcaagtcctccaggggttcttccgaccctcaaggcgtgacatgcggcgctgccaccctgagcgctgagagagtcaggggcgacaacaaggagtacgagtacagcgtcgaatgtcaggaggacagcgcctgtcccgccgctgaagagagcctgcctatcgaggtgatggtggacgccgtgcacaaactgaagtatgagaattacacctccagcttcttcatcagggacatcatcaaacccgatccccccaagaacctgcagctgaagcctctgaagaacagcagacaggtcgaagtgtcctgggagtaccctgatacctggtccacaccccacagctacttcagcctgaccttttgcgtgcaggtgcagggcaagagcaaaagggagaagaaggacagggtgtttaccgacaagacctccgccacagtgatttgcagaaagaacgcctccatcagcgtgagggcccaggacaggtattacagcagctcctggagcgaatgggctagcgtgccctgtagcggaggaggaggcagcggaggaggaggttctggaggaggcggcagcagaaacctgcctgtcgctacccccgaccccggaatgttcccctgcctgcaccactcccagaacctcctgagggccgtgtccaacatgctgcagaaggctagacagaccctcgaattctacccctgtaccagcgaggagatcgaccatgaggacatcaccaaggataagaccagcaccgtggaggcttgcctgcctctggagctgaccaaaaacgagagctgcctgaacagcagggaaaccagcttcattaccaacggctcctgcctggcctccaggaagacatccttcatgatggccctgtgcctcagcagcatctacgaggacctgaagatgtatcaggtggagtttaagaccatgaatgccaagctgctgatggaccctaagaggcagatcttcctggaccagaatatgctggccgtgattgacgagctgatgcaggccctcaactttaacagcgagaccgtgccccagaaaagcagcctcgaagagcctgacttctacaaaaccaagattaagctgtgtatcctgctgcacgccttcaggatcagggccgtgaccatcgacagggtgatgagctacctgaacgccagcggtggatccgagtccaggagagtgcggcgcaacaagaggagcaagggatcctggaggagtgcaggtggagacaatcagccccggcgatggcaggacctttcctaagcgcggccagacatgcgtggtgcactacaccggcatgctgggcgacggcaagaaggtggacagctcccgggatagaaataagcccttcaagtttatgctgggcaagcaggaagtgatcagaggctgggaggagggagtggcacagatgtctgtgggacagggcgccaagctgacaatcagcccagattacgcatatggagcaaccggacacccaggaatcatcccaccccacgccaccctggtgttcgacgtggagctgctggagctggagtaa

SEQ ID NO: 1198 - DNA, 1461 bp, Artificial Sequence; identical to SEQ ID NO: 835
  Description of Artificial Sequence: Synthetic Construct

SEQ ID NO: 1199 - DNA, 1999 bp, Artificial Sequence; identical to SEQ ID NO: 1197
  Description of Artificial Sequence: Synthetic Construct

SEQ ID NO: 1200 - protein, 486 aa, Artificial Sequence; identical to SEQ ID NO: 475
  Description of Artificial Sequence: Synthetic Construct

SEQ ID NO: 1201 - protein, 665 aa, Artificial Sequence
  Description of Artificial Sequence: Synthetic Construct
MCHQQLVISWFSLVFLASPLVAIWELKKDVYVVELDWYPDAPGEMVVLTCDTPEEDGITWTLDQSSEVLGSGKTLTIQVKEFGDAGQYTCHKGGEVLSHSLLLLHKKEDGIWSTDILKDQKEPKNKTFLRCEAKNYSGRFTCWWLTTISTDLTFSVKSSRGSSDPQGVTCGAATLSAERVRGDNKEYEYSVECQEDSACPAAEESLPIEVMVDAVHKLKYENYTSSFFIRDIIKPDPPKNLQLKPLKNSRQVEVSWEYPDTWSTPHSYFSLTFCVQVQGKSKREKKDRVFTDKTSATVICRKNASISVRAQDRYYSSSWSEWASVPCSGGGGSGGGGSGGGGSRNLPVATPDPGMFPCLHHSQNLLRAVSNMLQKARQTLEFYPCTSEEIDHEDITKDKTSTVEACLPLELTKNESCLNSRETSFITNGSCLASRKTSFMMALCLSSIYEDLKMYQVEFKTMNAKLLMDPKRQIFLDQNMLAVIDELMQALNFNSETVPQKSSLEEPDFYKTKIKLCILLHAFRIRAVTIDRVMSYLNASGGSESRRVRRNKRSKGSWGVQVETISPGDGRTFPKRGQTCVVHYTGMLGDGKKVDSSRDRNKPFKFMLGKQEVIRGWEEGVAQMSVGQGAKLTISPDYAYGATGHPGIIPPHATLVFDVELLELE

SEQ ID NO: 1202 - DNA, 63 bp, Artificial Sequence
  Description of Artificial Sequence: Synthetic oligonucleotide
atggccctgcctgtgacagccctgctgctgcctctggctctgctgctgcatgccgctagaccc

SEQ ID NO: 1203 - DNA, 63 bp, Artificial Sequence
  Description of Artificial Sequence: Synthetic oligonucleotide
atggccctccctgtcaccgccctgctgcttccgctggctcttctgctccacgccgctcggccc

SEQ ID NO: 1204 - protein, 22 aa, Artificial Sequence
  Description of Artificial Sequence: Synthetic peptide
MLLLVTSLLLCELPHPAFLLIP

SEQ ID NO: 1205 - protein, 20 aa, Artificial Sequence
  Description of Artificial Sequence: Synthetic peptide
MYRMQLLSCIALSLALVTNS

SEQ ID NO: 1206 - protein, 21 aa, Artificial Sequence
  Description of Artificial Sequence: Synthetic peptide
MAQVKLQESGTELAKPGAAVK

SEQ ID NO: 1207 - protein, 19 aa, Artificial Sequence
  Description of Artificial Sequence: Synthetic peptide
MRFLAATFLLLALSTAAQA

SEQ ID NO: 1208 - protein, 21 aa, Artificial Sequence
  Description of Artificial Sequence: Synthetic peptide
MGLLQLLAFSFLALCRARVRA

SEQ ID NO: 1209 - protein, 21 aa, Artificial Sequence
  Description of Artificial Sequence: Synthetic peptide
MLLAWVQAFLVSNMLLAEAYG

SEQ ID NO: 1210 - protein, 21 aa, Artificial Sequence
  Description of Artificial Sequence: Synthetic peptide
MKFQGPLACLLLALCLGSGEA

SEQ ID NO: 1211 - protein, 22 aa, Artificial Sequence
  Description of Artificial Sequence: Synthetic peptide
MDAMKRGLCCVLLLCGAVFVSP

SEQ ID NO: 1212 - protein, 35 aa, Artificial Sequence
  Description of Artificial Sequence: Synthetic polypeptide
MGTVSSRRSWWPLPLLLLLLLLLGPAGARAQEDED

SEQ ID NO: 1213 - DNA, 576 bp, Artificial Sequence; identical to SEQ ID NO: 799
  Description of Artificial Sequence: Synthetic IRES sequence

SEQ ID NO: 1214 - DNA, 591 bp, Artificial Sequence
  Description of Artificial Sequence: Synthetic Payload sequence
agaaacctgcctgtcgctacccccgaccccggaatgttcccctgcctgcaccactcccagaacctcctgagggccgtgtccaacatgctgcagaaggctagacagaccctcgaattctacccctgtaccagcgaggagatcgaccatgaggacatcaccaaggataagaccagcaccgtggaggcttgcctgcctctggagctgaccaaaaacgagagctgcctgaacagcagggaaaccagcttcattaccaacggctcctgcctggcctccaggaagacatccttcatgatggccctgtgcctcagcagcatctacgaggacctgaagatgtatcaggtggagtttaagaccatgaatgccaagctgctgatggaccctaagaggcagatcttcctggaccagaatatgctggccgtgattgacgagctgatgcaggccctcaactttaacagcgagaccgtgccccagaaaagcagcctcgaagagcctgacttctacaaaaccaagattaagctgtgtatcctgctgcacgccttcaggatcagggccgtgaccatcgacagggtgatgagctacctgaacgccagc

SEQ ID NO: 1215 - DNA, 66 bp, Artificial Sequence
  Description of Artificial Sequence: Synthetic Signal sequence
atgtgccaccaacagctggtcatctcttggttcagcctggtgtttctggcatccccactggtggca

SEQ ID NO: 1216 - protein, 5 aa, Unknown
  Description of Unknown: Granzyme B sequence
  MOD_RES (5)..(5): Any amino acid
IEPDX

SEQ ID NO: 1217 - protein, 5 aa, Unknown
  Description of Unknown: Enterokinase sequence
DDDDK

SEQ ID NO: 1218 - protein, 6 aa, Unknown
  Description of Unknown: Genenase sequence
PGAAHY

SEQ ID NO: 1219 - protein, 7 aa, Unknown
  Description of Unknown: PreScission protease sequence
LEVFQGP

SEQ ID NO: 1220 - protein, 6 aa, Unknown
  Description of Unknown: Thrombin sequence
LVPRGS

SEQ ID NO: 1221 - protein, 7 aa, Unknown
  Description of Unknown: TEV protease sequence
ENLYFQG

SEQ ID NO: 1222 - protein, 4 aa, Artificial Sequence
  Description of Artificial Sequence: Synthetic peptide
RTKR

SEQ ID NO: 1223 - protein, 20 aa, Artificial Sequence
  Description of Artificial Sequence: Synthetic peptide
GTGAEDPRPSRKRRSLGDVG

SEQ ID NO: 1224 - protein, 14 aa, Artificial Sequence
  Description of Artificial Sequence: Synthetic peptide
GTGAEDPRPSRKRR

SEQ ID NO: 1225 - protein, 15 aa, Artificial Sequence
  Description of Artificial Sequence: Synthetic peptide
LQWLEQQVAKRRTKR

SEQ ID NO: 1226 - protein, 18 aa, Artificial Sequence
  Description of Artificial Sequence: Synthetic peptide
GTGAEDPRPSRKRRSLGG

SEQ ID NO: 1227 - protein, 17 aa, Artificial Sequence
  Description of Artificial Sequence: Synthetic peptide
GTGAEDPRPSRKRRSLG

SEQ ID NO: 1228 - protein, 14 aa, Artificial Sequence
  Description of Artificial Sequence: Synthetic peptide
SLNLTESHNSRKKR

SEQ ID NO: 1229 - protein, 14 aa, Artificial Sequence
  Description of Artificial Sequence: Synthetic peptide
CKINGYPKRGRKRR

SEQ ID NO: 1230 - protein, 4 aa, Artificial Sequence
  Description of Artificial Sequence: Synthetic peptide
RGDS

SEQ ID NO: 1231 - protein, 8 aa, Artificial Sequence
  Description of Artificial Sequence: Synthetic peptide
SARNRRKR

SEQ ID NO: 1232 - protein, 21 aa, Artificial Sequence
  Description of Artificial Sequence: Synthetic peptide
GSGEGRGSLLTCGDVEENPGP

SEQ ID NO: 1233 - protein, 22 aa, Artificial Sequence
  Description of Artificial Sequence: Synthetic peptide
GSGATNFSLLKQAGDVEENPGP

SEQ ID NO: 1234 - protein, 23 aa, Artificial Sequence
  Description of Artificial Sequence: Synthetic peptide
GSGQCTNYALLKLAGDVESNPGP

SEQ ID NO: 1235 - protein, 25 aa, Artificial Sequence
  Description of Artificial Sequence: Synthetic peptide
GSGVKQTLNFDLLKLAGDVESNPGP

SEQ ID NO: 1236 - DNA, 321 bp, Artificial Sequence
  Description of Artificial Sequence: Synthetic Destabilizing domain
ggcgtgcaggtggagacaatcagccccggcgatggccggacctttcctaagcgcggccagacatgcgtggtgcactacaccggcatgctgggcgacggcaagaaggtggacagctccagggatagaaacaagccattcaagtttatgctgggcaagcaggaagtgatcagaggatgggaggagggagtggcacagatgtccgtgggacagggcgccaagctgacaatctctccagattacgcatatggagcaaccggacacccaggaatcatcccaccccacgccaccctggtgttcgacgtggagctgctggagctggag
